United States Patent Application Publication US 2026/0271966 A1 - sequence listing, part 6

SEQ ID NO: 27 - DNA, 4063573 bp, Bacillus amyloliquefaciens (residues 2,031,788-4,063,573 of 4,063,573)
  source 1..4063573: mol_type = genomic DNA; strain = Strain 006 ELA191006 ATCC PTA 1267065
ttttcacttgtttatgcaatcggaacgcctgtcatgatggcccttacagcaaaactggacagaaggaagctcatgatctatgctcttggattgtttgtaatcggaaatatcatttcatttcttgtacagggatacggcttatttgcggcagcccgggtgatcatggcgcttggagcaggaactgtggtggtcaccgcgcttacgatcgcagcaaaaatcgctcccccgggaaaacaggcaagttctctcgcgaccgtcattatggggtttacggcggcgctcattatcggtgttccgatcggaagaaccgtgtctgaagcttttggctggaaggtggttttcgccggaattgcggcaatcggaatcattgccatgcttattatacgttttgcgttgcctgagataaaaggagataaaccggtgccgcttattcagcaattttctcttttgaagaaacgaaaggtggctgtcgggcttgctattacgtttttttggctcggaggctattcggttgcgtatacgtacctttctccgtatttactgaacgtcactcatatcggcagcggaatactgagtacattgctgcttattttcggtgttgctagtcttgccggttctaaagcaggcggtttcagtgctgacaaatggggggcgcgtatgacattaaccggcggaatggcgcttcatgctatcatgctcatgttattgccgtttgtcacacattctgctttcggagcggcggcagtgcttattttttggtccttcgccgcctggtcatcaggacctgctcagcagtatcatttggcaacgatggagcctgaatcatcgggtgtattacttggcctcaaccagtctgtgatgcagctggctatggcggccggggcgggcatcgggggcattgttgtcactcatctgtctcttgcgtcagtgacatggatcggatcagcgggtgttgtcatcgcgatgtgcggcgtgctttcacttgcctcgttaacatctgaaaaaccctcatctgaatacagtgcagaataaacaaaagcctcatttctcagcttgagaaacgaggctttttgcctagttattttttatattgtttcaagtttacgccgattgcggctccgtttcggcttgagtcggcaactccggtaaaggtgccgttttcacgatcgatcaggatgctttgcacattaccgatatcaaccgggctgctgccgaatttatgccccatttcgttcagttttgtgcgggcttcttccggcactcctttttcatatctataggatgtcatgctgtttgtgtaaattctcggctcttcgaccgccgctttcagatccatgccgtactcgactttgttcaggatcgtttgcaggacggaagaaataatcgttgctccgccgggagagccgacagtcaggacaggttcgttatttttgaataaaatagtcggagtcatgctgctgagcggacgtttattcggctgcacttcatttgcgccgccaggcaccgcatcgaagtctgttaactcattattcaacacaacgccgtatccgggaaccataatgccggaaccgaacagctgttcaatcgttgtcgtataagatacgacattgccgaagcggtcggttaccgtgaagtgggtcgtttggccttcttgtttgtcagtcggctgcttcacttgtttatagtttgcagaaccttcctgataggcccaagggtcgccggctttcggttttttattgactttatcaatatctatcagctgtctgcgggcattgatataatctggattcaagaggcctttgagagggacgttgacgaattctggatccccggcaaatgcggcgcggtcagcataagccaaatgcatcgtttctgcgagaagctgatatttttgccaagaacggatatcatattgagaaagcttaaaatcatccagaaggttcagcatttgcaacaggaaaacaccgcccgagcttggaggaggagcagttgcgatatgatagccctggtaatccccccagatcggttcgtcaatcgtcacattgaagtttttgatatctttttctgtcattgagccgccgaattcctgcactgtttccgcaagctttttggagaatgcaccgtcatagaatgcttttgtgcctttgtacttaatagctgtaaatgttttggctaagtctttttggatgagtgtgtctccttctttcagaggttctccgtccggaagaaacacgtcttttgcagcggtgtgtgataatttgtttttataatctgagatggcatcagctaaaaccgaatcgatcggaaagccttttgaggcaagtttaatggaaggggtgatgagttgtttcatggagcgtgtgccccatttgtcgagcgctttttcaagtccttttaatgttcccggaacaccgactgcagtccctttagtaacgcgttcggagaaagggatggctttgccgttttcgtcaaggaacatatccggtgctgcgcctgccggtgcgcgttcccggctgtcgataatggtggtgtctttcgtcttcgcatcataaaccatcataaatccgccgccgccgattcccgacatcataggttcagttacgtttaatgcgaattgaatggcgaccgcggcgtcaattgcattgcctccttttttcagcacgtcggcaccgatttgtgaagcgagaggatgggcggtggcaaccatgccgtctttgccgacatctacctgtttgtagtcgtcataggaaaacgggtgtttcttagcctgagcgtgataagggatgcttccggccgtgagcaaagtactgagcagaacgataaaacagagattcataaactttttctttttcatagtctgcctcctttgttttccgcttacaattatagagtaagtaaaatgtgctgttttcacaagtgacaaacggaatagtccggtgcgcaaaaagccggagtttctgtgtgaatgtaatcagtcgcaaataggctaaatgggaaaccgggcagaaaaagctgtgaaacaagcataaagacaaaaaataagctacaataaacaaaacagaattcactcacatgacatatgaaaggaacgtgagccatgtatttaacgatcaaagagacagctgagtttaccagtcttcctgaagaatatgtgcacaatcttgttttgacgaataaaataagggccgtacatgacggacagcaatatttaatcaacaaggaacaatttcaaacccatctcgaacagctggaaaaatataaggaaatgattcaagagtttttaaatgagccgcttcctgaagacattgatgtaaaagatgaagactaggacacaatttcatattgtgtctttttttttcatttttttcggttgctcacaaaaaaacgaatgctcagatttcgttttaagggcgttgtttttcttttttaataccgtgagtctctgttgatttaaaatcccgtcatcgggtcgaaaatgatgttttgaagacttcgatgaaactgcgtgccttattccccttatgtaacactatgtatattatgttacataaggccctttatcctttatcattcaacaggtttcggctataatagtaacataatgctcaatatgttactttaccaattataaggggttttttgatgcatatcgtacagccgatccgaagtttggagaagatccaggaagtcaaacagtatttaatgaagaaaagtgatcgtgattattttttatttattttcggcatgaacagcgcactgcggatttctgatgttctgccgcttcgcgtgagggatgtaaggaacaaagaccatgtgtgggcaaccgaaagcaaaacgagaaagaaaagaaaaattctgatactggagtctttgaaggccgacatatacgcttatacaaaagacatgaaagaggatgactatttgtttaaatcgaaacggacgaataagcccatttcccggattcaggcatacagaatattaaaggaagcagctgccgcgtgcggattggaggaaatcgggacgcatacgcttagaaagacgttcgggtatcatttttatcagaggacaaaagacattgctgaactgcagaggattttgaatcattcttctccgtctattacaatgcgttatatcggaatagatgaagatacgacgagagccgcctataaagtgttcggagggctgtaggcttgaaaaaaacggccgccagcgttactataatagaagcaggctctagtagcacagcggatagtgcagcagtttcctaaactgcaggtcgggagttcgaatctctcctagagcgttttcgacataagataggtgcggattaataatgtcggcaagacagaaaaccccttgttatacaaggggtttttgagtttaatattttgcaagaacctggtggaaatgatgtgaaaaaagcccgctgtaagcaagcgggctttttcttatatgacagcatcaaattgattgactttccaaacgttgttttcttttacgaatgttacatcgcgttttgctgacggtgaaccgtcaagagtcggtacagtgaagcggtatgtttgaacgcttccttttttagaaagaagagtcatttttgcttttttccaattcaggaggttatctccgtcgccgagcggaacagccaatttgccgtcttttacagtgaagtggtaatctttgagccctttgtcaatcgcttgctttgtaaaagcgggtgtcagatattttacggctttcgcttttgttccgaggtctttgcacataaagacgtattgaagattttgatattcaaacggttcagatgtgcagtttgcgtttgatttaagcgcaccgccgctcatcgtgttccagaaatgttctctcgctgacagggccagctgaagtgcttgtttttgtgtaaggtcattaggtgcattttttgcggtcgccgcagtgcccaatgacagaatcaatgtaatagtagtgaggaataatagccattttttcatgatataatctctccttcaatcaatctctttctcttatgttacaaatgttacaataattacgataagattacaataccttttcagaaatattttccggactttttatttttatggtttatttccatgtaagacgtgagaataagataaagagtttcattgaacaaaaggtttttacaagctgtctgctgaataataaaatggaagaaaatcaaaaaaggagtcctacatatggaagtacaagatcatttagaaacagcggaaggccgcggccagtctgtctggcgatcgatgtcactgtttttagtgccgctgcttttaagcaatgtattgcaatctgtcggccaattggtcggaatggtatttgtcggaaggtggctcggagttgatgcgcttgccgccgtatcgtctttttttccgctgttttttctgctgatctcctttacgatcggaatcggttcgggaagttccattctgatcgggcaggcttacggcgcgaaaaacgaagagaggatgaaggcgattgtcggcactacactgacttttacctttatgctcggtgttgttctggcagttgtcggcagtgtgtttacgcttgatattctgcggctgatgggaacgccggaaaacgtaatagatgtcagtgtccgatatgcgcgtattttgttttgcgcaatgccgctgatgtttttatattttgcgtatacgacatttttacgcggaacgggagattcaaagactccgttttatacgttaatcgtcagtacagtcataaacatcggtctcttgcccttattgattctcgggcttttcggacttccgaagttcggcatttacggttcggcgtatgcaaccgtgatttcaaacatcgtgacatttatcgtactcatggtttatttgcggaaaaggaaacatccattggcatttgaccggactgcgctccgttctcttaaaatggacaaaaagctgctcgcgcttttactccgtctcggtattccgtcaagcatcaatatgattctcgtatcactttctgaaattgcggtcatttcatttgtcaatcattacggatcaaacgcgacggctgcttacggggtcgtcaaccaagtggcgagttatgtgcagatgccggcggtaagcctcggtatcgccgtttcaatttttgccgcccaatccattggcgccaatcaattcggccggctgaagcaggtcatcaaagtcggcatcggcctgaattatttgatcggcggggttttgattgtgctgatttacaccttctcccggcagatactggctttgtttttaaccgatcaggatacactccgcattgcccgcaatctgattatgattaccctttggagctatctgattttcggtcacgctcagattgtttcagcaacaatgcgggcgagcggtacggtgttatggccgacgattatcagcatttttacgatttggggaattgaagtgcctgtggcctttattctttctcattatacgaatctcggcattctcggcatttgggtcggttatccggcggcttttgtcgtcagcctgctgctgcaatacggatattaccggtttgtatggaagaaaaaacagattacccggctgattcaataaggttttaccgcacatcgctcagttcatacgggcgatgttttttttagagaaggaaaatgagtttagaaaatggaattcctatacatgctagaaaacaaggaaagggcaggtgcttatgacgattgaacatacgacttatttaggagtttcagccataaaggcggagactgatcaggctgaatgcatcattgtgccggagtggggatcaaatgtcatatcgcttcgggataaaagaaccggtatgcggcttctgagagaaccggaaactgcggaggaattcctcaaaaaaccgatgctgtacggcattcccgttttattcccgccgaaccggattacggacgggacgtttcgttttgacggccgctcgtatcaattcgagataaacgaagaggataaacataatcatattcacggctttcttcacaatcagcattggaaagcggcagcagcgaaagaagagggggatggaatgacagtcgaaacagaaattgatctttcaaagattccccgtgttcataaacaatttccgcacgatgtcattgtccggatgacctatacattaaaagacaatgtgtttacgcagcgggcgctgattatgaataagggaacggaggcttttccttgggggctaggctatcattccacatttgttttcaatgaagagcaatcccgtctatttttgacggctgaccgcatgtgggaattaaatgaacgtttcgtaccgacgggccgtttattggatgttcctgataaagaagcgttccgtcatgggatgtctttgaaaaataaacagtttgacgatgtttttctttcttccggacggaatggcggcaataacgaagctgttatttatcatccgaatgagaaattatccgttttgtatcaggcagacacgtctttcaagcattgggtggtatataacggtgacggaaagcaggggtttgtcagtcttgagccttatacttccgttacagatgcatttaatctgaatcagcctgcatcactgacagggcttcagattctgaaaccgggcgaagaagcggctgcgtcatccgggatcaccattttgcatgacgaagaataggaaagaggcgggataacattgaaaacatatgtgaaacgcttgtgcgcggtgattctgcttttgatcattgccgaagttccttatattgatgatgcggctaaggcggctgaacaaaaaaatactttgcaaaaagagctggaacacattctggatgaagaacccgctttaaagggggcttcagcgggcatcattgtccggtcagcaaaaacaggggaggtgctgttcggcagccgggaagatatgcggctgaggcctgcatcattgatgaaactgctgacggcatctgcggcgctttccgttctcggagaagattacacctttaagacagaagtacgggcagacggcgccgtgaaaggaaaacagctgcgcggaaacctttatctcaggggaaaaggcgatccgaccctattggcttctgattttgagaagatggctaaacaggtcaaagccagaggcatccatgtcattaaaggagatctggtcggggatgattcgtggtatgacgataccaggtattcagttgatcttccgtggagtgatgaaggccaatattatggcgcgcaagtatcagctcttaccgcttccccaaatgaggattatgataccggaacggtgattgcggaaatcagcccggcgaaacagcccgataaaaagccgcgcatttcaatttctccctatacggacatcgttcgtgtgaaaaatgaagtaaaaaccgtcgcttctgatgaaaagaaagaattgacggttgaacgggagcacggtggcaatgtgattacgataaagggagccatacctgccggctcggcaaaggcaagagaatgggcggcagtgtgggatccgtcgtcctatgctttagatttatggaaacaagcgcttactaaacagggtgtaactgtaaaagggaaaatcagaacaggccgaatgccgcaccgcacccagcttgtcacatcacggacatccatgcctctttcagaattattgatcccgtttatgaaactgagcaacaacgggcacgccgaaattctgatcaaggaaatgggaaaagtgaaaaaaggggagggcagctgggaaaagggcttggacgtgatgaaatcggagctcaaatcgttcgggctcaatccggatgaattgattgcaagagacggatccggcgtttctcatattaacggcgtatccgccggccaaatcggagagcttttgtatgcggttcagaaagagaagtggtacccggctttccttcgttcgctccctgtcgccggtgcaagcgacagaatgacgggaggcactcttcggaaccggctgaagaatactccggcagagggcaaaattaaagcaaaaaccgggtcactaacatcagtcagttcgattgccggctatgcagacacaaaaacaggagatacgcttattttttccgtgcttcaaaacgggctgcttgacgaagatgacggaaaagacattgaagacaaaatcgcagtcgtgctggcaaatcaataagaagggccggatccttagagggttcggcttttttgatgtctgtaaaacattatattgcgattatgaatcaatcttttcaaaaagtaatatcggcaacattcttccttttttttacatgatactttcttacttgttcactgatttttcattttttatcataaaatttcttttcggaaagcaaaacctttttaaaagcgcaattaattatacattttattccttattatagtgttttagaaccagtttgcagtgtacatacatactgttttacatggtataaaaattatagaaatgaagaagtgaagtgaggaatatatactatattctaaaaaatgttagaaaaaatttaattttttattgtgatttctaaaatatgttttaaaataatgcttatatggatgatttagtcatatgctgtcgaaatttaattgtaattatttcactttcttatcctcttaaattgaaatggagggattccattgaagaacactgtttattctttaactcacgcccaaagaagagtctggtttacagagctgctcgagccgggcacaagtatctgcaatcttgcggcgtgcgtcaaattcagggggaatatcgactttgacgtattgcgccgtgctttagatttctctatcttgcaaaatgattcgctcaggtttcaactgacggaaggggacggctcagaaccccagctgtatctggccgggcatcggccgatttctttagagaccgttgattttactcatattgatcaatcagagcgggatgcatggattgacaaacagacgcgtgttccgttcaagctgtttcattcaccgctgtatcattttactctgcttgtcatgtcagacgaagaagtttggctttattcaaaatttcaccatattattatggacggcatctcgctcaatctgcttggcaatcagctcattgaaatctaccaaaaaatcatgcgaagcgaggatttggccgaacaccaaagcccttcctatctcagctacatggaaaaagaacagcaatacctacagtcttcccgttttcaaaaagaccgttcattttggactgaaacataccgaaccgttccggaacacctttcactggcggaacgaacctctcatcttagacaaagcactgcagcttcaagagatacaatcactctttcccactccttagaacaatcaatccggcgtttttgcaaagatcataatgtcagcatcatctctctgtttatggcttcgttatacatatgcatcagccgtctgacggctaaaaaggatattgccatcggtacttattacggaaaccgcggttccaagctcgaaaaggatatgctcggcatgttcgtcagcacgctaccgatcagaatgacggcagatccggatgcggagttcgtgtcttttgtccgcagtgtaggaaaacagcagctgtctgttatgcggcaccagaaatatccttacaatctttttgtcaatgaattaaggcagattcatcacgacctgcaaaatatcatcgggatttcgatgcaataccagcctctcgcgtggcgtcaggcagaaggtttcgattatgaaacggcgatgtttttcagcgggcatacggcaaatgagctgtccattttaattaaggagcggacagatacgggattgattgagctgaattttgattatcaatccgctttatttactaaaacatcgattaaacgaattcaaactcatttgctgacgatcgttgaaaatgccgttagaaatccaaaccggctgattcggcatattgatatggcggatgaaaaagaaaagaaacgggtgttaactgcgtttaaccatacagaaacggctgaaccgccggccccgacgcttcacgggctgtttgcccgccgcgccgcgctttcgccgcatcgtccggcgctccgttttccgggcggtatgctgacgtacgctgagcttgaccagtacacagacaggctcgccgttcggctccgccaaaaaggcatccgcaaagaaagcatggtcggcgtactcgctgaacgctcgccggagatggcggtttcagtgcttgccgtgttaaaagcgggcggcgcctacgtgccgcttgacccggagtatcctgaggacaggctgcgatatatgcttgaggacagcggcgcttgtctcctgcttgcacagccggggttatccgtttccggtttttccggtgaaacgctagaagtgtctctttcttctctgacaaatgagacggagacaggggctgtctctgaagaagcggatgctgattcgctcgcttatatcatttatacgtccggttcgacgggaacaccgaagggagtggctgttgaacaccgtcaagccgccgcctttttatcagggatgcaagggcagtttccgttaacggaagaggatattatcgtgctgaaatcatccttttcattcgacgcctccatctggcaattgttttggtggacgatgtccggcgcctccgtgtatctgcttccggccggctgggagaaagatcctgtgcggatgattgaagcgtttgcctcagaaaaggtgacgaccgcgcattttattccggcgatggtcaacagctttttagacgcgctggaaacagagcctgcggaaacaagaacacgcctcggcagaacactgacacgcgtgttcgccggaggggaagctctttccccgcttacggctgcccggtttgccgatcttctgccggagaccatgcttattcacggctatggaccgacggaagcgacggttgatgcggcgttttacgtctgtgaccgaaaacgggacagcggacggacaaggcttccgatcggaaaacccgttccgggtgcccgtctgtatgtattagatagcggaggaaccatccagcctgcgggcgtggcaggagagctgtacatcgcggggaccggcgtggcccggggctatctgaaccgccctgagctgacggaggagcgctttgtcgttgatccgttttatccgggagaacgcatgtatcagacgggcgatatcgcacgctggacagaagacggccttgtcgaatggctcggtcgttcagacggacaggtgaaagtccgcggctaccggattgaaccgggggaaatcgaagcggcgatccggcacatcgacggcattcgtgaggcggcggtcaccgcccggaccgaacacggcgaaaccgcgctttacgcctatattgaaggacgaaaaagcgatgacgtgcgggcggagcttgcgacacgccttccggcctacatgatgccggctcagtttatagagatgagcgaatggccggtcacgccaagcggaaagcttgaccgccgcgcgctgccggctcccggcggatcggcagacagacaggcgtacactgccccgcggaacgtcacggaaatgaagctttgcgccctttgggaagaggtgctgaaaaacggccccgtcggcatccgggatcacttttttgagcggggcggccattcgttaaaagcgacggctctcgtctcccgcatcgccaaagagttcggtgttcaggtgccgttacaggacatcttcgcccggccgacggtggaagagctcgcttcggttattcaggacttggaagaaagctcgtatgaagcgattcagcctgcgcaaacacaagatacctacccggtgtcttcagcgcagaaacggatgtatgtgctccaacagcttgaagacggcggtgtcggctacaatatgccggctgtgctggaactgacgggcccgcttgaccgtgtccggctggaggagacgttccggcagcttgtggagcggcacgagtcgctcagaacgtcctttgaaacggggcctgacggcgaaccggtgcagcgcatccatgacagcgtgccgtttcagctcgatgaggccgagtcagctgacgcattcgtccggccgttttgtctggaggaagcgccgctcttccgtgcggccctcgtgaaagaatcggaagaacaccatcttttattaacggatatgcatcatattatttctgacggtgtgtccgtcaacaccttgataaaagaattcggcgagctgtacgcaggccgttcgcttgcgccgatgcgccttcaatataaagactatgccgtctggcagcggtcgtttcaggagaaagaaggatatcagaagcaggaagcctattggctgaagcggcttgaaggagagcttccggtgcttgaacttccggctgacaagccccgtccggcggtcagaagctttgcgggcggcagcgtatcgtgcacgcttgacgctgacacggcatccggccttcaccgcatcgcccgggatcacggctccactttgtatatggtgcttctcgccgcgtacaatacgctgctcgcgcgattgagcgggcaggaagacatcatcgtcggatcgccgattgccgggcgcccgcacaaagaccttgaaccgattctcgggatgttcgtcaacacgcttgccatcagaacggagccgaagggggacaaacggttcaccgattatttggcggaagtccgccaggcggcgcttgaggcgtatgaacatcaggactacccgtttgaagagcttgtggagcggctcggcgtgcagcgggacatgagccgcaatccgctgtttgatgtgatgtttattcttcagaatatggagcgggaggagataaatctggccggtctgaaggcgtcacgatcaaagcataccgaacatgatgtatcaagttttgacctgaccttatcagcggctgaatccgatggaaacatccgctttgagatggaattcagcaccgagctttttatgaaagaaacgattgaacgctggatgggccacttactgaatctcttgcgccatgttgccgccgaaccggaagtcacactatcgaaagctgacattttggatgaagaagaaaaacaaaagttactgattgagtttaataacacacaaaccgaattcatggaaaaacacaaactgtttcaccagctgtttgaagagaaagcagaagaaacgcctcatcagaccgctgttattgaaggagcacaacagatcagctatttccagctcaatgagcgggcaaaccgtcttgcccgaacactgcagaaaaatggattcggtccgggaaaaagagcagccatattagcaaaccgttcgattgaagcgatcgtcagtgttcttgcggtcatgaaatcaggaggagcgtatataccggttgactcccattatcctgaggaacggattcgctatttattaaaagacagcgcggcatccgtcttgatggtgcagtcagaatacaaagaacttgcttcacagctgacggatcacaatttatttctcattcagcttgatcatgaagatcaatacgatatttccgcaaagaatattcagccgacagcgtcaccggatgataccgcatatatcatatatacttcgggaacaacgggaacgccgaagggagtcgaagtcagaaatcgcagctttacgcatgcagcacttgcatggcgcaggatttatgagcttgatcttataccggtcagagtgctgcagatggcgagtttctcatttgatgtattttcaggggatctagcacgcgccctgctaaacgggggaacgcttgtcatttgtccggatgacgtccggcttgagccgcagcagctttatcggctcattgatcagcaccgtatcacgtttatggagtcgacacccgcgctgattgttccgtttatggaatatatataccgccggaaactcgcgctgcaaagcgtaaaaatactggtacttggttcagatatgatcaagtcgcaagatttttatacgcttcatgaacgctttgggaaagaaatgcggatcattaacagctacggtgtaacagaagcgacaattgactcttcgtattatgaagccgaaatgagcgaagagccgcgggaagatgatgtgccgatcggtgttccgcttccgaatgtgcaaatgtacgtcttaaacaaagacaaacaggtccagccgatcggcgttttcggagagctgtatatcggaggcgccggcgtcgccaaaggatattggggacagcctgagctgacagaggacgcattcagtgacccgttacaaacgggagaaacgctttacagaaccggagatcaggcttgctggctgccggatggaactcttcgttttaaagggcggatcgataagcaggtgaagatcagaggctacagaattgagacgggagaaatagaaagtgtgcttttgaaacacgatcaagtcaaagaagcggctgttaccgtgatgaaagatgccgaaggacaagcacgattagcggcatacgtcgttcctaaagaggccgatatctcatcactccgccagtctcttatgcaggagctcccggcttatatgatgccgtctcatattatcggtttagacagcatgccccttacactgaacggcaaacttgataaatcggcattgccggcagaagagatacattcatcacaggcatttgtcgcgcccggcgatgaaaaacaggcgatgttatgccggatttgggaagatgtgcttcatattcagaaagcgggaattcatcactctttctttgagcttgggggagattccattaaggcgcttcaagtgtcagcccgactcgccggagaaggctggaacatgtcgatccgcgatttgtttcagttcccgacgattgcagaactcgcgaagcacctcacgccggctgttgcaacggctgatcagggcccgatagaaggaagcgctccgctgacaccgatccagcagagattttttgaggagccgggtgcgtttgagcttcattataaccaatcagtcatgctgtgcagtgaagacagcctcgaaatagatgcgctgtatcaggcggtttgcgcgctgacagaacatcatgatgcgctgcgaatgactttcactgaaaatgagcatggggaagttgttcaatataaccgcggaatcacagagcagcatgaagaaatctttacgcttaacgtcatagatctttcagaagaaacacagccggaaaaacggatagccgctgaggaaaaagaaatacagcaggctatgcgccttgatcaaggccctctgcttcatctcggagtgttcaggctgaaagaagccgaccatctgctcatcacgattcatcaccttatcacggacggcgtgtcgtggagaatattgcttgaagatctgcagacagcatatcagcaggcattggacggcaaacaaatcgaactgccgccgaaaagcgattcttatataaagtatgccgaagagctttttgacatttccaagagcaaagcattgctggaggaagccgcatactgggacagcgtgatgtctggtgaaacagcgccgctgccgaaaataactgatgaaaacgccggacgattgcaggaaaacgcgcgcactgcatcatggatattaagcagcgaagtcacgaagcagctgctgatggaaacacagcaggcgtacggaacggatgttcatgaattgcttttaacggcgcttggaatgacgcttcatgagtggacgggttccgaacagatccttatcagcactgaaggacacggacgccaggggcatattcctgacattgatatgtcaagaacggcgggctggtttacatctgtttacccggtgcttttggatatgagagtgccggacggctcaggggaaacaaccgcgcaccgcataaagacggtaaaagacatgatgagacgggttcctcatcacggaaccggctacgggctgctgagatattcgcgaaacattctttataaagacccagaaataagctttaactatctcggtgcgtttgacggtcttgaggggacgctgaagatgtcaccgttcaagccgcagcatgatatagcggccgggcgcatccgcgagtttgatctggatattaacgcgatggtggcggccgggcaactggaggtaaaagccgtttataccgatgtatttgcaccgggggcaatcgagttcttcatgaatcgtttccatactcacctcggggacatcatcgcccactgttccggcaagaaagagcgggaaaaaacattaacggattacagccatacagaattgaccgctcaagccctatcaagcattgaagatctcgtaaaaggactttaatttcataaaaaggtgtgtggcattcgtgacacaagcgacagaaattcaagatatttaccctttatcatatatgcaggaaggcatgctgtttcattcgcttctggattccggatcaaacgcatatgttgagcagatttcgtttacagtcagcggggatttatgcattgatacattccaaaaaagtctggatatgcttgtcagccgttatgatattttcagaacgattttcataaaagaagtgcctgaccttgaagggccgcagcaggttgtcctttcacgccgtgacactgccgtacggactgaagacatttcagattattcggaagaacggcagcaaagcatcattgacaaattcaaggaaaccgaccggcataaggggtttgatctgcaaaaaggccccttaatgcgcctgactctttttcaaacgggagaaaaccgccatacgtgcgtttggactcatcatcacattatgatggacggctggagcttgggccttgtactgaaagatttcttcagcatgtattatgcgatccggagcgggcggcctgtaaacctcggcagtccggctccttacagcacttatatcaaatggctccgaagccggaataaagaagaaacgtcagcattctggtcgcgctgcttggaagattacggagaaaccgtttccgttccgcaaacgaagaataagacggcgcaaaacggttatgcatctgagcatttccaattttcccttgagcctgaaaccgtacaaaaactgacagacattgcccgaggcatcggggtcacgctgaatactatatttacgggcatttggggtctgcttctccatcgttacaacgggactgaagatgccgtcttcggttcggttgtttccggcaggccttcagctatcagcggcattgaatccatggccggactgtttatcaataccgtgccggtaagggtgcgcgcggctggtgatatgactttttcttctcttctcaaaaaggtgcaaaaagagtcactcgctgcggaagagcacagctattatccgctttatgacattcaaaacgagagcggcctgcaaaaagatctcttgaatcacatcctggtttttgaaaattatccggttcagatgcaggctgcggtaaacggctggcagcaaacggaaagccatgcgctctcacttgaaaacttttcgatggcggaggaaaccaattacgatcttaacgtcgtcatcgttccgggagaagagttttatgtgaaattcagctacaatgcgggcatctacgatcgggaagacatgaaacggatcaaagggcatattctagaggtcatctcctgtgtaacggaagatccggacaggcttttatcaagcatcagtctcgtaccaccggaggaagaagccctgattcattcgtttaacgaaacgaaccgtccgtaccctgagacaaccgttcatgggctgtttgaagaacaggcggcaaaaacgcctgaccaagaggcgttgagatataacggggtaagctggagctacaagaaattaaatcagcgggcaaatcagattgcccatgcgttaagggaaaaaggcgcccgttcagatcagatcaccgctgttatgctgcgccgatcaatgagtacggttgccgctctgctcggaatttggaagtcgggcagcgcctatatgccgattgatgcggaatttccgcctgaacggatttcatttttactgagagacagtgaagcctcactgctcctgactgaaaaagacctgctccccctcattccgccgcatttcaaggggagcgtcgtcatcatggaggaaacggtttcccagcagactgcaccgcttccgccggtgtctgacagcggaaattgggcgtatgtcatttacacttccggaacgacaggccggccgaaaggggtgcttgtacaacacaaagcgatcagcaatacattgcaatggcggcgtgaagaatacgggatgacagaaggagacatagcgcttcatcttttttcatacgtatttgacgggtcattaacgagtcttttcactccgcttctgtcgggcgcctgtgtactgttaactgatgaagatgatgcgaaagacgtcctttcaataaaacagaaaatcgcccgccacggggtaagccatcttctgatcgttccgtctctgtatcgcgttctgcttgattcgctgacgaaaaaggatgcgcagacgcttcgggcggtgacatttgccggggaagcggccactcctgatatcgtggaagcgagccgcaacatatgcccgaatgccgagctgctgaatgaatacggcccgacggaaaacagtgtggccacgacgattctgcgcaacctgcaaaaaagcagccggattacgatcgggcgcccgattgccaacacttctgtctatatgatgcacggagatcggctgcaaccggtcggagccgtcggtgaactgtgtatttccggaaaaggtctggcggacggatattttcagcaaaaagagctgacggacaaagtctttacccctcatccgtttcgtaaaggtgaacggctgtacagaacgggagatgcagcccgatttttaccggacggaacgattgaatatatgggacgctttgacgatcaggtgaaggtaagaggttacagaattgaattaggagaaatcgaaacggcactcagaagtctgtccggggtaaaagaggcggcagtcatcgtgcgcaaaacggcggacggggaacaggagcttgcagcttatgccgtactggaaaacgcgggtgtgacatttgatcctcatgccgaattggccgggagattacctgcttatatgatcccgggaagctttaccaaattgacggaaatgccgctgtctgtgagcggaaaacttgaccgggccgcacttcctgagccgaaagaagccgagagaaccggtgattatcaagctccgcgcacaatgcttgagactgagctgctgtctatttggcaagaagtgctgaaacgggaacacatcagtatgagagatgatttcttccaaatcggcggacagtcgctgaaagccgcgtcgcttgtttcaaagatacataaacggctgcaaattgaacttgccgtccgccatgtttttgaacatccgaccatcgagagcatggcccgcttcctagaacagaggaaaagaggagaatatgcagaaatcacgcctgcggaggcaaaggacttgtacccgctatcttttgcgcaaaaaaggctttatgcccttcatcagcttgcggcggacagtacgggctatcatatgcccgcttgtctggaactgagcggcagactcaaccgtgatcgtctgcacgaagccttttcagcgctgttacaaaggcatgaagcgttacggacatcatttgttttacgaaacggggagccgatgcagcacgtacattcacatgtcgatctcgatctcacagagattcacatgccatccgggacacttcttcaagaggcgatggaaactttcgtcaaaccgtttgacgtggaaaaagcgccgcttttgagagtgactttagccaaagccactgaagaacgtcattttctgctgcttgatatgcatcatcttattgcagacggtgtgtcaatgagcgttctgatccaagaattgacggatttgtacagaggaaaagagctgcggccgttaaaacttcagtacaaagatttttccgtctggcagcatgagcggttcgccgctgaagaattcaaaagacatgagcggtattggctggatgcgatcggggaaaatattccccttcttgatctgccgctcgataaaaagcgcccgcagcttcctgatttcagcgggtccgttgttcgaacgcgcctacaaaaagaaacggcggagaatttgcgccggctcatggatgagacgggttcgacactgtatatgattcttttggcaggctactccttgttcctttctaaattgagcgggcaggaggacattgtcgtcggttcacctgcggccggcagaagccgcgctgagcttgatggggtcatcggcatgtttgtaaataccgtggcaatgagaagcaggccgaaaggggataaaacattccgcgcttatttagaagaggtgaaaatgctcgccctcggcgcagccgaacatcaggacttcccgtttgaagaacttgcccaaaagcttgatacacaccgggaagtcaatcgcaatccgctgtttgatgccatgctcgttttgcaaaacagtgatgatttcaaagtgaaccttccgggcttatccgtttcttcacatgcagtgaaacatgacatttcaaaattcgacttgacgcttcatgccgaggaacggccggacggctcactggattttcattttgaatacagtaccgcgttgtttgaaaaaggtacgatcgaacggtgggccggtcattttaaagagcttttaggacaaatcgcatcggatgatgagcggaagctgtctgacattcatttgctggacacaaatgagcggcagatgcttcttcaagcggaaaatcaaacagctgagtatccgaggcatgagacgatcgtcagtttatttgaggcacaggcggaaaaaatgccggatcaaattgcagccgttatgtccgatgagcgtctcacctaccgcgagctcaatgaaaaggcggatcgaatcgccgatatgctgtcggaaaacggcatccgctccggacagattgtcggaattatgaccgaacgatctcctgaaatgctgatcgggattttcggtattttaaaagcgggaggagcttatctgccgattgatcctgactatcctgacgagcggatttcatttatgctgactgacagcggcgcgcgtgttctgttgacgcaatcgggtcttgggatatccggaatggacgggctgccggttttatacatcgataagcctgaatccgtttcagcagacagaacgaaagaaatgataacgcctgaacagccggcttacgtgatttacacatcgggcacaaccggaaaaccgaaaggcgttatgacggagcaccgcaatgtcatcagccttatcacacataaaggactgccgtttgatttcggcactggagacgtctggaccctgttccactcctattgctttgatttttctgtctgggaaatattcggcgcgctcttatacggcggaaaggtagttatcgtgccgaaagaaactgcccgtgatccgcatttgtaccggcagctgctgcaaagtgaaggcgtaacggtgctgaaccaaacgccgacggctttttccggactcattcatgaagaagccgggcatgcggacaagctgaagcttcgatatgtcattttcggcggagaagcgctccagcccggcatgctgaaaagctggaaagagaagtacccggagacagagcttgttaatatgtacggcattacggaaaccacggttcacgtcacatgcaaaaaactgaatatggatgatattgagagaaataaaagcaatatcggcagaccgctggaaaccctccatgcttttgtcatggacgcctatatgaatccgcagccgatcggaattccaggtgagctttatatcggcggggaaggcgtcgcgaggggatatgtaaacagggatgatttaaccgcctcccggttcatcacgaatccgcacattaccggcatgcggctctaccggacgggcgatattgccaaaagactctcaaatggcgagctggaatatgtcgggcggaaagatgcgcaagtaaaagtcagaggccacagaattgagctgggagaaataaaatcagcgctgcaggagctttccttcgtgaaagaggccgccgtgatcacacgtgctgatcagcacggtcagcactccatttacgcatacgcggtcttacacgggaatgaaaaaataaaagaagcagaggttcaggcctctctcagagcttttctgccggaatatatgattcccgcccgcttgatagagcttgatgaactgcctttgacggcgaatgggaagctggacgagaaggcgctcccgcagcctgaattaaatgaaagccttggagatgatatcagcctgagaaatgaaactgaagaaatgatggctgacatctgggaagaactcttaggtgttgaaggactcggccccaatgctcatttcttccatctcggcggggattcgattaaagcgctgcaagtatgtgcgaggctgaaacagcagggctatgaaacgaccgtccgcgagctgttcgagcatcagacactgggagaagtctcgatgcggctccggaaagtccgccgcgtgattgatcaggctcccgtcacgggagacgtgccgctgacgccgatccagcactggttcttttcgcaatcattgccgcatgatcattttaatcagtccgttatgctcagcagtgcggacaggatcaatgaatctgctatgagaaaagcgctggcacagctcgcggttcatcatgacgcattacggatggtatgcggcacgcaaaacggatcagtgattcaatataacagagcggataacctttctgaagaagaactctttacatttgaaacgcatgacgtgagagggaaagggttattacaagaggaacacgccgcaattgaacaggcggccgcccgcattcaaacttccattcggctggagacgggtccgctcgtagctgtcggtttatttcacgctaatgatggcgatcatctgctgctttccattcatcaccttgtcattgacggagtgtcatggcggattttatttgaagatctcaccgcgtgctacaggcaggcgctcgaaggaaaagaagccgcgcttccggcaaaaaccgattcctatcagacttacgcgaagcaaatctctgattatgcaaaaagccgccggctgttacaggaagcagactactggtccgaaagagaaaaagcggcggtcaaaccgcttccgaaagatgcccgcatctcttccaatcttctgaaagatacagatgtgatgaccgttacattgacaaaacaggagaccgagcagctgttaacggaagcgaacagagcatacacaacagagacgggcgaattattgcttgccgcgttaagcctagcgctgaacagatggaccggaaacgagacattcaaaatcagcatggaaggccacggaagggaagagcacctggagcatcttgatatcagcagaaccatcggctggtttacgtcaatttatccggtattggttgacgcaagttttcaagatcagcctgatgacggcgagcgtctcggctatcacattaagcggacaaaagacatgatgcgccgcataccgcataaaggagcgggatacggggtgctgaaatatataagcaaactctggggagagactgaatctgattctcctgaaatcagttttaactatctgggacagtttgaccgggaaatccgttccagcggcttcggtgtttctcccgtaaaagcgggaaatgaagtcagcccagactgggaacgtccgtacacacttgatatcagcggctccgtatcgtcggaatgtctcagcatgcatgtcgtgtacaaccgttttcagtatcaaaaagaaacgattgaagttttgacgggatattttcatacctttctcaagcagattatcacgcattgcacaggcaaagaggagcgtgaatggagcgccgctgatttcagtgacgaggagttaacgctggaagatctgagtgacattatgggagccgtcaacaaactatagaaaaggagtggcgcaatggggcagcaaccggaaatacaagatatatatcctttgtcttttatgcaggagggcatgctttttcattctctgttggatcatgactcaagagcctacttcgaacaagcggtgtttacgatcagcggacagcttgaccgggaacggttccaaaaaagtatagacactgtttttgaacgatacgatattttccgtacgacatttattcacaagaatgtggcaaagccccgccaagtcgtgttgaaaaacaggccgagccgcgttcagtttcatgatatttctcatttggacgagaaggcacaagacaaatatgccgaccggtttagaaaagaagataaagataaaggctttgatttgcaatcagaccctctcatgagagtctccattttgaaaaaagcgcctgaacgctatgtttgtatatggagccatcatcatattgtcatggatggctggtgcttcggaattgtcatgaaggaatttctgatgatctatcaatctctcggagacgaacggcttccgttcctcgagcccgttcagccatatgggaagtatattaaatggctcatgaagcaggatcgtaaagaagccgagattttttggaaaacgagacttgccgatcttgagcaaacggcgtctcttccgaaaaaatccgcggaaccaaacggcgaacttgagcaggcggttttcaccatttctgaagagcagacaaatgagctgaagaacattgcggcaagggcgggagcaacgctgaatacagtgttccaggcactgtggggcattttgctgcagcgtgtcagccgctgtgatgatgccgttttcggttctgtcgtttccggccggccgtcggatctcgcaggcgtggaaaaaatggtgggactgtttatcaatacgattcccgtacgggtgaaaagcggttcattttcttttctggagcttgtcaggcatttgcagcaggagacgctgcaagcagaagcgtacagctattatccgctgtatgacattcaggcgcaaagccctctgaagcaagcgctgtttgaccacattatcgtgtttgaaaatgtgccggcccagcgtgaaattgaaaatgtgagtcaggccggttcatttgattttgcggtagaggattttacgatggaagaagtcacaaactacggatgcagcataaaggtgattccgggcaattctctttatatccgcttaaaatttgataccggtatatacgacgatgtttttatgaagaatatcgaaacatttttacggcatatggtgaactcagtcatttccgaccctgaaatcggcgcttccgagatcgcattgctggatgcgtgtgaagccagaagtatgatggatgcatttaaccatacagaagcggttgaaccgccggctccgacgcttcacgggctgtttgcccgccgcgccgcgctttcgccgcatcgtccggcgctccgttttccgggcggtatgctgacgtacgctgagcttgaccagtacacggacaggctcgccgtccggctccgacaaaaaggcgtccgcaaagaaagcatggtcggcgtactcgctgaacgctcgccggagatggcggtttcagtgcttgccgtgttaaaagcgggcggcgcctacgtgccgcttgacccggagtatcctgaggacaggctgcgatatatgcttgaggacagcggcgcttgtctcctgcttgcacagccggggttatccgtttccggtttttccggtgaaacgctagaagtgtctctttcttctctgacaaatgagacggagacaggggctgtctctgaagaagcggatgctgattcgctcgcttatatcatttatacgtccggttcgacgggaacaccgaagggagtggctgttgaacaccgtcaagccgccgcctttttatcagggatgcaagggcagtttccgttaacggaagaggatattatcgtgctgaaatcatccttttcattcgacgcctccatctggcaattgttttggtggacgatgtccggcgcctccgtgtatctgcttccggccggctgggagaaagatcctgtgcggatgattgaagcgtttgcctcagaaaaggtgacgaccgcgcattttattccggcgatggtcaacagctttttagacgcgctggaaacagagcctgcggaaacaagaacacgcctcggcagaacactgacacgcgtgttcgccggaggggaagctctttccccgcttacggctgcccggtttgccgatcttctgccggagaccatgcttattcacggctatggaccgacggaagcgacggttgatgcggcgttttacgtctgtgaccgaaaacgggacagcggacggacaaggcttccgatcggaaaacccgttccgggtgcccgtctgtatgtattagatagcggaggaaccatccagcctgcgggcgtggcaggagagctgtacatcgcggggaccggcgtggcccggggctatctgaaccgccctgagctgacggaggagcgctttgtcgttgatccgttttatccgggagaacgcatgtatcagacgggcgatatcgcacgctggacagaagacggccttgtcgaatggctcggtcgttcagacggacaggtgaaagtccgcggctaccggattgaaccgggggaaatcgaagcggcgatccggcacatcgacggcattcgtgaggcggcggtcaccgcccggaccgaacacggcgaaaccgcgctttacgcctatattgaaggacgaaaaagcgatgacgtgcgggcggagcttgcgacacgccttccggcctacatgatgccggctcagtttatagagatgagcgaatggccggtcacgccaagcggaaagcttgaccgccgcgcgctgccggctcccggcggatcggcagacagacaggcgtacactgccccgcggaacgtcacggaaatgaagctttgcgccctttgggaagaggtgctgaaaaacggccccgtcggcatccgggatcacttttttgagcggggcggccattcgttaaaagcgacggctctcgtctcccgcatcgccaaagagttcggtgttcaggtgccgttacaggacatcttcgcccggccgacggtggaagagctcgcttcggttattcaggacttggaagaaagctcgtatgaagcgattcagcctgcgcaaacacaagatacctacccggtgtcttcagcgcagaaacggatgtatgtgctccaacagcttgaagacggcggtgtcggctacaatatgccggctgtgctggaactgacgggcccgcttgaccgtgtccggctggaggagacgttccggcagcttgtggagcggcacgagtcgctcagaacgtcctttgaaacggggcctgacggcgaaccggtgcagcgcatccatgacagcgtgccgtttcagctcgatgaggccgagtcagctgacgcattcgtccggccgttttgtctggaggaagcgccgctcttccgtgcggccctcgtgaaagaatcggaagaacaccatcttttattaacggatatgcatcatattatttctgacggtgtgtccgtcaacaccttgataaaagaattcggcgagctgtacgcaggccgttcgcttgcgccgatgcgccttcaatataaagactatgccgtctggcagcggtcgtttcaggagaaagaaggatatcagaagcaggaagcctattggctgaagcggcttgaaggagagcttccggtgcttgaacttccggctgacaagccccgtccggcggtcagaagctttgcgggcggcagcgtatcgtgcacgcttgacgctgacacggcatccggccttcaccgcatcgcccgggatcacggctccactttgtatatggtgcttctcgccgcgtacaatacgctgctcgcgcgattgagcgggcaggaagacatcatcgtcggatcgccgattgccgggcgcccgcacaaagaccttgaaccgattctcggggtgttcgtcaacacgctggccatcagaacggagccgaaaggagacaaacggcttaccgattatttggcggaagtccgccaggcggcgcttgaggcgtatgaacatcaggactacccgtttgaagagcttgtggagcggctcggcgtgcagcgggacatgagccgtaatccgctgtttgacgtgatgtttgtgctccaaaatatggagcgtgaatccctgaatttaaatgagctgcatttgactcaagccgcggatgcaggtcataaaaccgcaaagtttgatgccacgctttacgcggcagaagggtctgacggttccatcagctttgattttgaattcaatacagatatctatcaaaaacagacaatcgaaaaatggctttcttattttacccgtattcttacaaaagtaattgaagaccaaacaataccgcttggtgacattcacgtactggatgatgctgaaacaaatcgcgttatttatcagtttaatcagacgaaaagcgattacccaagacacgaaaccatcagccgtttatttgagcggcaggctgaagaaacccccgatgcccgggcagttgtatatgatggacaaatcttgacataccgtgagctgaacgaacgggctaatagaatagcggcggctctccgatcaaatggcgtcggtccggaaagtgttgtcgccttattaaccggacgtacaacagagcttgcttccggaatcctcggaatattaaaagcgggaggcgcctacttgcctatcggtgacgatgtgcctcgggaacgggctgaatggatgcttaaagactgtaaagctgatattcttctccaatctgataaacttgacggtctgccgctttccggaaaacgtttattcatagaggatattcaaacaaaggccggcttaagttcggaaaatcccgaaccgctcggcggacctgaatcattggcctacatgatttatacatccgggtcaacaggtgcgccaaaaggcgtcatgattgaacagcgaagtgtgatccgtcttgtgaaaaacagcaattatattgattttacgccgaaagacagactgttgtttacttcatcattaggatttgatgtaacgacatttgaaatattcggtccgcttttaaacggtgcttctttatatgtaagtgaccaggaaacctatctcgactctgatgttctggaaacatttatacagcaaaacggcattacgacactgtggctgacatcgtctttgttcaatcatctatcagaacaaaatgaacacgtgttttccggattatcccgattgattatcggcggggaagcactgtccccaagtcatgtaaaccgggttcggaaaacgctgccgcatctttcaatatggaatggatacggaccgactgaaaacacgacgttctcgacttgctttttgattgaacaatcatacgatcattcaatcccgatcggccgccctgtcggaaattcaactgcatatatcataaacagcaggggaacaccgcagccgatcggcgtcatcggtgaattatgcacaggcggagacggtgtggcaagaggatatttcggccgccctgagctgacggaagaaaaatttgtccctaatccttttgttcccggagaacggatgtaccgcaccggggatttagcccgctggctgccggacggaacgattgaatatgccggacggatggatgatcaagtgaaaatccgcggttatcgggtcgagctgggagagattgaagccgcactaaggagcctggacggcgtgaaagaagctgccgtgtcagtcagaaccgggcagtccggcaataaagaactgatcgcatatatgagtctgcaggcggacatggatacagaaaaagtgcgttcttcactttctaagcaactgccgaattacatggtcccggcctatatgatggaacttgagaagctgccgcttacgccgaacggtaaattggatcggaaaaatctgcccgaaccggagctcgcgcttcaaaccgcgtacacagctccccgcaatgagcttgaagaacagctttccgtgatctggcaggaagtgctcggcacaaaacaagtcgggattgaggattcattttttgagttgggcggcgattcaatcaaagcgctccaagttgccgcacggctcggacgctatgggtggaaaatgacggcaagtgacttattccggcatccgtccattaaggaactcgcgcctcttatccggaaagcggaaagagtcatcgatcagcaaccggtggaaggagacataccttggacacccgttcagcactggtttttatcacagcggatggaaaacagaaatcatttcaatcagtccgtcatgatgttcagctctgacgcattgcataaacagccgctcaaacaagccttggagcatcttgtcattcatcatgatgcactccggatcaccgtcagtgcagaaaacgaaagtatcagacaaatcaatcacggtattcaaaaagatgaactgtacagcttggacatttgggatctgtctgagacagatacttgggaaagagaaatagaagatgaagtggctgcgctccaacagcggatggatattgaaaaaggaccgttattaaaagccggctggttcaaaacccggtcaggggattatttattcatcaccgtacatcacctggcggttgacggagtgtcatggcgtattctgctggaggatttatctgccgcttacacacaagccgtaaaaggtcagccggtccagcttccgccaaagaccgattcgtttaagcaatacgccgtaaggctttcagaatacgcaaaaagcagcaagctgatgcgtgaagaagaatattggcgttttattgaagaagaaacagccgccggacttccttatgaaaaaccgcagtatcagacgggagccgacagcattcggcaaacggtaagctttacgcttacagaagaagaaacgtccgttttgcttcagcaggtcaaccgggcctaccataccgatacgcaagatgttcttctgactgccgcagctttggctttacgggactggacagggggcggcagactgcgcatcgcgatggaagggcacgggagagagcacatcatgccggagctcgacatcagccgcaccgtaggctggtttacctccatgtacccggtgctcattgacttgaacacagcaggcgctgagcttggaacggctgtaaaaacggtcaaagacacactcggaagaataccggataaaggaataggctacggcattttaaaatacatgacaccgcctgaacaaaaaacaatccgcttcagacaagcgcctgaaatcagttttaactatttagggcaattcaatgatacagaagatcagcccacattcagtttatccggtcttgcgagcgggcacgacatcacgccgacatggcagcgggaacaagcggtggaaatgagcgcgatggccgctcaacataaactgcacttcagtttgagctatccgccgagccgcttccgcaaagaaacgatggaacagctgctgcaaaccttacagcaatatttgcgtgatattatggcgcactgcacaggcaaagaggaagcagaaaaaaccgttagtgattttagcagcaaaacgttaacatctgatgatttggacagcatagcgagttttgtcgaggaactgtagaaaaaggcgacggggagattataacatgacaaaaaagaatgcaattcaggatatttatccgctgtcttatatgcaggaaggaatgctttttcattccctcctgcaaaaggaatcacaggcttacgccgagcaggcctccttttcaataacggggaaggttgacacccgcgtgtttgaagagagcgttcatgcccttttcgaaagacatgatattttcagaacgatctttatcagccagaacgtgtcagtgccgcagcaggtcgtattaaaagagcggaacgtcagcatcattgaggaaaatctcaccaatttaaacaaggctgatcaaatcaagcatattgaagaagccaaacgaagagaccgaaagaaaggatttcacctgcaaaaagacatgctgatgcgggtgacgctgcttcaaaccggtgaatgtgaatatacgtgcatatggagttttcatcacattattatggatggctggtgtctcggaatcgtgctgaaagagttcttccagatatacgcctcgcggctccgccggacaccgttaacgcttgagcccgctgtgccgtacgggacctacatcaagtggctgatggagcaagataaagaaaaagccgcttcgtactgggagcgataccttgaaggctttgagcagcagactgttctgccgaagcagaaaaaagccggcgaaagcagccaagaggaagtgacgttttccttttcaaaagaggacacagctaagctgaaagatctggccgtgaaagaagaggtcacgctgagcaccatttttcacacgctctggggcattttgcttcaggcgtataaccagacagaagatgcggtttttggttctgttatttccggaaggccgtctgaaatcaaaggcatcgagcgaatgatcggcctgttcattaataccgtgcctgtccggatcagcggggcggacattccgtttcaaaagctgatcaaaaacgtgcaaaaggacgctttgaaaggacaggcatacagctatcatccgctttatgatatacaggcgaattcacaggtaaaacaaggcttaattgaccatattctcgtctttgagaattatccggttgaacaggagcttgatgtactgaacagcaagggggacacgaaagacctttttcacatccatgatttcagcatggaagacgaaaccaattacagtttttacctgatggtggcgccgggtgacgagattcacttgaaaatgagatacgattcaagcatgtatgaccgccaatttatcgaaaatatcaaaggtcatttgacacatatcgtttcccagattctcgacaaacctgatatcacgccggataagcttgtaatcatcactcctgaggaaaaagagcagctgcttgcgccgatttctgaagagactgaaaagcctgagtatgacacgattcatgcgatgtttgaacggcaggccgcacaaacgccggatcaaatcgcgatccggtatgaaggcgggtcagtgacgtacaaagagctgaatgaatcggctaataagctggcccgtctgctgcaaaaacgcggattaaagcgggaggagccggtaggcgtcatgctcggccgttctccttctttagcggcggccgttctcggtattttaaaagcgggcggcgcctttgttccgatagatccgggcagtccaaaggagcgtatccgatatgttattgaaaacagcggctgcatccatgttgtaacagagcggcatcagtcactccccgcggaacaaacgctgcaggttacatatatagaagaggccgggacggaagcggacggaagcaatgtgcaatccattaatacggcggacgacctcctttatatgatttatacatccggtacgacagggaaaccgaagggcgtgctgctcgaacataaaaatatggccaaccttctttctgaccaattgacgaacacaggcattgatttttgcacaaatgtgctgcagtacgcatctttggcgtttgacgtctgctatcaggagttattttcagtactcttgagcggcggcaccctttgtatcgtgcccgaatcaatcaaacgggatgtttctcagctgtattcgtttatcgatcagcacaaaacggaagtggtgtttttcccgactgcgtttgtcaagatgcttttcaatgaagaaggttatgcacagtcttttccccgctgtgtgaagcatgtcattacggccggggagcagctgactatctcacgtttgttcaggcagacgctccgtttacacggtatgcagctgcataatcattacggcccgtcagaaacccatgtggtttcaacgtatacgatttctgcgggagatgacatacctgaacatccgccgatcgggaaaccgatccatcataataagatgtatattctcagcaaaaacagacagcttcagcctctcggaattgcgggagaattgtatatttccggagcgaatacaggaagaggctatgtgaacaatccggcgctgaccgaagagaaatttttgccggatccgttcagaaagggcgccgtcatgtaccggaccggagatttggcaagactgcgtgcggacggccaaatggaatacatcggccggacagatgatcaagtgaagatcagagggtaccggattgaaccgaaagaaattgaaaccgttctggcaaatcatcatgccgtgaaagaagctgccgtgctgattcaaacgaatgagtcgggcgaaaatgaattatgcgcctactgcagcgtctcacaagcgactgatccttctcagctgcgaagtgatttggccaaagagctgcctgattatatgattccggtcaaatgggctttcattgacgcgattccgctcactgcgaacggtaaagtcgatcagcgggcccttccggaagcttcggcgtacgcagcgggccgtcgatatacagctccccggaatgtgaccgagctgaagcttacccgcatatgggaagaagtgcttcaaaccggcccgatcggcgttcacgatcactttttcgagcttggcggccattcattaaaggcgacggcactcgttgcaaaaatagctaaagagtgcagcgtgcaaatcccgctgagtgatgtcttcagctatccgactgtagaagaactcgccaaaatcatcggtgaagcagaagagaatccgttcgcatccatagaaaagacagaagcaaaaggaacttatcctgtctcatccgctcaaaaacggatgtatgtccttcaccagcttgaaaatggcggtgtcagctataacattccagccgttttagaggtgaaggggccgtttgaccgagacaggatggaagccgtgttcaaggagctgatccggcggcatgaaccgctcagaacgtcctttgaagaaaaaaacggccggcctgtgcagaggattcatgacgaagtgccgtttgcatttacaaaagaacaatcagccgaagcgtttatccggccgttcgatctcggcaaagcgcctcttttccgggcgggatttgtccaaatagaaaaagaccggcatctgcttttagctgacatgcatcatattatttcagacggcgtatccgtcaatcttttgatacgtgaattcagtgagctgtatgctgagagaagtctgccgccgttacggattcaatacaaagattatgccgtctggcagcaatcatttaaggcgggcgccgcatatcggaaacaagaggagtactggctgaaccggcttgccggggagattcccgtgcttgaattgccggctgataagccgcgtcccccggtgcggagcttttccggtgaccgggtgtcatttgtcatcagcgaaaaacatacagcgcagttgaaaaagctggcgaaagaaaacaaatgcacactttatatgacgctgctcggtgtgtacacggttctgttagcccgtttaagcggacaggaagatatgattgtcgggtctccgattgcaggaaggcctcatgccgaccttgacgccgttctgggcatgtttgtcaatacgctcgctttcaggacgcgtcccgacggaagcatgacgttcaaagaatatttaaaggaaattcgccaaacagcgcttgaggcttacgagcatcaggattacccgttagaagagctcgtcgataagctcggtgtgccgcgggacatgtcccgaaatccgctgtttgacacaacatttgcgctgcaaaatatggaacagcagaagcttagggcagccggacttgaactgcagccggcagacgtcagcctgccgatttctaaatttgacttatcgctgtacatctccgaaaacgccggtgaattgtactgccagtttgaatacagcactgatttgtttgagagaaaaacgattcaaaaatgggcggaatttttcacgacacttgctgaaaacgccgcagctgatccgggtttggaattagacgatatttctgttttgtcagaaaaagaagaagtgtctctgcttcaaaatttcagccccttgcagaaaacagcgtttccgcttcatcagccccttcatgagctgctggaacaacaggcggaaaaaacgccggaccgtccggcgattttaactgatgagatttcgattacgtatcaggaactgaacgaaagagcgaatgagcttgcgcaccggctgatcaaacgggggataaggctggaggataaaactgccattatgggccggcgttctcctgacatgctgatcggcatttacgctgtcttaaaagcaggcggtgcatatctgccgattgatccggattacccggaagagcggattcgctttttactgaaagacagcggcgtgaaattcttactggcagaaccagaacttttcgcaccagatctttttaagggagaaacgatctctctgaaaagcggacaaacaggaaacccggaagctgcggccaaccccaatgttccggtaaagcctgattcattggcttatatcatctatacatccggttctacgggacgcccaaaaggcgtgcaggttgaacatcagtcagccgtaaactttttatactcgctgcaagcgcgttatggattaaaggattccgacaccattttgcataaaacatcatactctttcgatgcttcgatttgggagctgttttggtggccgatcgcgggagcttctgtttttctccttccgcaaggcggcgagaaagaccctgaaatgatactgaacgcattggagaaaaaccgcatcacggcagctcattttgtgccatccatgcttcatgctttcttggaatatataaattccagaaaacagccgatcaaaaagacctgcttaaaaagggtttttgccgggggcgaacaattgggcccgcacttggtttcccgtttttatgaccttctgccgggaacggaattgacaaattcctacggtccgacggaagcgacggtagaagcggcgtacttcgatttgccgcaaggaaaggaatttcacaatgttccgatcggcagttccggacataacatgcggctgtatattttaaatcaaaagaaacagcttctgccgccgggctgtatcggagagctgtatatcgcagggaccggcgtggcccggggctatctgaaccgccctgagctgacggaggagcgctttgtcgttgatccgttttatccgggagaacgcatgtatcagacgggcgatatcgcacgctggacagaagacggccttgtcgaatggctcgggcgttcagacggacaggtgaaagtccgcggctaccggattgaaccgggggaaatcgaagcggcgatccggcgcatcgacggcattcgtgaggcggcggtcaccgcccggaccgaacacggcgaaaccgcgctttacgcctatatcgaaggacgaaaaagcgatgacgtgcgggcagagcttgcggcacgccttccggcctacatgatgccggctcagtttatagagatgagcgaatggccggtcacgccgagcggaaagcttgaccgccgcgcgctgccggctcccggcggagcggcagacagacaggcgtacaccgccccgcggaacgtcacggaaatgaagctttgcgccctttgggaagaggtgctgaaaaacggccccgtcggcatccgggatcacttttttgagcggggcggccattcgttaaaagcgacggctctcgtctcccgcatcgccaaagagttcggtgttcaggtgccgttacaggacatcttcgcccggccgacggtggaagagctcgcttcggttattcaggacttggaagagagcccgtatgaagcgattcagcctgcgaaaaaacaggacacctacccggtgtcttcagcgcagaaacggatgtatgtgctccaacagcttgaagacggcggtgtcggctacaatatgccggctgtgctggaactgacgggcacgcttgaccgtgtccggctggaggagacgttccgggagcttgtggagcggcacgagtcgctcagaacgtcctttgaaacggggcctgacggcgaaccggtgcagcgcatccatgacagcgtaccgtttcagctcgatgaggccgagtcagctgacgcattcgtccggccgttttgtctggaagaagcgccgctcttccgtgcggctctcgtgaaagaatcggatgaacgccatcttttattaacggatatgcatcatataatttctgacggtgtgtccgtcaacaccttgattaaagaattcggcgagctgtacgcaggccgttcgcttgcgccgatgcgccttcaatataaagactatgccgtctggcagcggtcgtttcaggagaaagaagggtaccagaagcaggaagcctattggctgaagcgacttgaaggagagcttccggtgcttgagcttccggctgacaagccccgtccggcggtcagaagctttgcgggcgggaaagtatcgtgcacgcttgacgctgaaacggcatccggccttcaccgcatcgcccgggatcacggctccactttgtatatggtgcttctcgccgcgtacaatacgttactcgcgagattgagcgggcaggaagacatcatcgtcggatcgccgattgccgggcgcccgcacaaagaccttgaaccgattctcggcatgttcgtcaacacgcttgccatcagaacggagccgaaaggagacaaacggtttaccgattatttggcggaagtccgccaggcggcgcttgaggcgtatgagcatcaggactacccgtttgaagagcttgtggaacggctcggcgtgcagcgggacatgagccgtaatccgctatttgatgccatgcttgtcgttcagaatatggaacatgaggaattgctgttggacggtttgcatattcagcctgcggacgtgtcccgtccggtttccaaatttgatgtcactttgcaggcttctgaaggcgggggacagattcattttctgtttgaatatgcggcgtctttattccggaaagaaacgatgcagcgctgggcttcccactttatgacgatgcttgaacacattgtccgtgaaccggaaacttctatacaagcgatcagcatgctgactgctgcggaacgggaccgaattctttcggactttaacggcatgacggataaacagctgcctgaaaaaacagttcatgaactgttcatcactcaggcgcgaaaaacaccggatgcggcagcccttatcagcggggaaacgttggtcacatataaagaattagatgaatggtcgaataaaatcgccagagctctgcaaaaacggcagatcggaccgaatgccgccgtcggcattgtgataccaagatcaccggaacaagtcgccgcagtcttcggggtttggaaagccgggggcgcctacgttccgatagatcctgaatacccggaggaacgcaagcaatatatcatttcagacagcggcacagcgcttctccttaccgtacacggcgcaatagatcaagtgcctgatcattttaaaggtgaagtgctcgcactggaggatatccaagaacaagacgcatcaccggttcagccattatcagcaccggaagatttggcttacatcatttacacgtccgggacgacaggcaggccgaaaggggttatggtcgaacatcgttccgtcagccaaacccttcaatggcgaagcggattttatgatctgaatgagaaagatacggttcttcagcttttttcattttcatttgacggttttgtaacaagtatgttcacaccgctgatttccggtgcgaaagcggccgttttagccgaagatgaagcaagagatattcttgccattaaacactatcttgcatcttaccgcatcactcatatgatcattgttcccgtactgtaccgtacactgcttgacgtactggagccgggggatgcagagtctctcagaattgtcacattagctggagaagctgtcgaccaaaacattatcagccgcagtttatcagtttgtcctcacacggagcttgccaatgagtacggcccgacggaaaacagcgtcgccactacagcggcaagacatatagaacaaagtgagaacattacgatcggccggacgattgagcattcacacgtttatattttaaacggggatcacccgcagccgatcggtgtaacgggagaactttgcatttcgggttccggccttgcaagagggtaccgcaatcttcctaagcaaacggcccaagcctttgtccaagacccgttccagaagaaccggcgcatgtaccgcacaggcgatctggcaaaatggctgccggacggcacgctgcaatatatcggccgaatggacgagcaagtcaaaatcagaggctaccgggtggaactgaaagaaattgaatcggccttaacaggcataaaaggtgtcaaagaagcagccgtcaccgctcataccgcatcagcaggccaaacggaactatgcgcttatatcgtgacagaagaaggaacagaaagtgaaaccgtgcagcaggcgctcagaaatgaaatgcccgcttatatggtgccggcgttctttgaaacacttgaagccctgcctgtcacaccgaacgggaagcttgaccgccgcgcgcttcctgagccgcggaaaaaagcgcacaccggacgggcatttacggagcctgaaagcgacatggaaaaagagctttccgcgatttggagcgaagtgctcggaactgaaaacattgccgcggatcaatcattttttgaactgggcggcgattccatcaaagccctgcaagtatcagcccgattacatcaggcaggaaaacagatcgccgtaaaagatattttcagccggccgacaattagagagctggcgccttatgtccgtacagagcggcagccggtcagccaagctcctgcagaaggagaagtgaagtggtcgccggttcacaaatggttcttcacacaagacatgaaggaagcaaatcattttaaccagtccgtcatgctgacgagaacaaattcaatagatgaagaggctctcaggaaaacgttaaaagccattaccgttcatcatgatgctttgcgccttgtctgcaaaaaagacgaagagaaaggtcttctcctcttcaacagaccggctgacctcgcagatgagcagctttacaacctgaccatattagaaacggaaggcgatgagcatgagaaggaacgttttataaaacgccgcgtcgcagagcttcagagaaacatggatttggagaacgggccgctggtacaggcgggactgttccgctctgaagcagaagattacttgtttctgacggtccatcatctcgctgtcgacgggatatcatggcggattttattggaggacttggcttctgcttatgagcaggccgcctctggacaggaaatcaaactccctccgaaaaccatgtcattcaaaacatatacggagcagctggccgattatgccgaaagcaaacagcttcttcagcaggcggagtattggcgggagattgaacactatgaaacagaaagtcttccttacgagcaggcagatctatctcaaactcctgcaaaaaaacggaacacggtatccttcactctgacagaaagtgaaacggacgccctgttgaaagatgtgcacagcgcctacaatacggatacgcaagatgtgctgttggcttccgccgtgcttgcccttcaaaagtggtcgccgcagcacgctttgaaaatcgcccttgaaggacacggacgccaatcggagcaggcaggtgcggacatcagcaggacagtggggtggttcacttccatttacccggtgcttgtccggagcggagtttatgaacctcttgaagaatatgaaattcgcacattgaaaaccgttaaagacacattgcggcgcattccggataaagggaacggatacggcgtcctcaaatatttaacaccgccgaagcttgccgggatgactttcgggaaagcaccggagatcagctttaattatctcggacaattcgatgcgcccggcgggagtccggcagaaacggaacagcctgacgcgtttcagttttctcctttgggaggcggagatgatgtcacagatacatggaaacgggagcagtcacttgaaatcagcgctattgcggcaaaaggccggatgaccgtcagcatttcctatgaaacggagcgcttccggcaagatacgatcgaacggctgtccgaaagctgccggtattatctcctgaaactgtcggaacactgcctcagcaaaaccgatacggagaagaccgtcagtgactttgatgatcgggagctgactgaggaagccttgcaggatattgccgacttactcagcttccactaaaccgagcgggaggaacacatggacaaaacaaaaaacatccaaaatatttatcccctcagccgaatgcaggaaggaatgctttttcattcctttctgcaaaaggagggggctgcatatatcgagcaatccgtcttcaccataaaaggccggcttcgtccggaattgtttgagcaaagcgtacagtctgtcatcagccgtcacgatattttcagaacggtttttttacctcatgtcgctcagctgaacggcccccgccaagtcgtgctgcgtgagcgggaattccggctgcaccgcgaagatcttacacatttggatgaagcggaacagagcgcctacttacagcgatttaaggaacgtgaccgcttaaaaggctttgacttgcaaaaggatatgctgatgcgtgtgtctttgtttaaaacggctgaggaaaaatatgtatgcgtctggagccaccatcacatccttatggacggctggtgcctcggcatcgtccttcaggaattcatgcatatgtaccgggcgattgaatcaggctcacccgtcacactggcgcccgcaaagccttacagcacgtatattacatggctgactgatcaggacaaagacgcggcttctgagtattggaaaggatatttagcaagctgcgagacaccctcaggactcccgaaaatatcggcccgtccccagggaaaaggctaccgtaagaaagagctcctgttttctttagatcaaaatctgacagacaggctgaaaaccatcgccaaagaagagggcgctacgctcgcggttcttatgcagactgtatggggcctgatgctgcagcgctacaaccggacggacgatgccgtattcggcgccgtcgtatcagggcggccttccgtcattgacggcgtggaaagcatgatcgggctgtttatcaatactgtgccggtacgcattaaaacgggtgacgaaagctttagagaactgctgggccgctgccagaaagaaatgcttgattcagaggcgttcagttatcatccgcttgctgacatccaatctcagactgagctgaaacaggatttaatcgaccatatcatcgtgtttgaaaattatccgattcagcagcagatgagagacgcggaaaaggaatcggatgcaccgttccggatcgggaatgtcaatgtttcggaacaatcgggctacgattttaacctcatcatagcgcccggcgatgagctgatcatcaaattcagctacaatgcgaacgtttatgacgaagtatggatagagagcgtaaaaggacacttggaagaagcgctgcgcggcgccgccttcaatcccgatgttcccgctgatcggcttccgatgctcggacaaaaggaaaaatcaagaataatcggcgaatttaatgacacgaaaacaacgtatgaaagagacgaaagcatcatcagcctgttcagccgacaggtgaagaaaaccccggaccatcaggcgcttcacgccggcgggctgacgatgacgtaccgggagctcgatgaacggtcaactgcgttcgcccgcatcctgctggaaaacggtttggcgccaaaaggaattgccgggattcttgccgaacgctcaccggaatttatcatcgctgttctcgctgtattgaaagcgggagggacgtaccttccgctcgatgcagaactgccatccgacaggatcgccgaaatgctcactgagagcggagcacagctgttaacggtacaaaaagggattgagactgacattgacttttctcacatcatctctatcccggctgcagctgaaaaacaaacagctgatgagggaaaactgaataccgttacgtcacctgatgaccttgcctatattatgtatacatccggttcaacaggaaaaccgaagggtgtgatgatttccaaccgcaacgtcgtatcgctcgtgtcaaacagcaattacacgtcagccggcacgacggaccgtctcattctgacaggatccatcggttttgacgcagtgacgtttgaaatcttcggagcgctattgaacggagcgtgcctccatgtggttgaccgcacgacaatgcttgcccctgagaggttcggcaattatctttcttccaacggtattacgattctgtttttgacgacggcgctttttaaccagtttgcccaggcggatccggagatgttttgcggattgcacaccttatatgtcggcggagaagcattgtccccggcgctcatcaataaggtcagacaccgctgtccgaatctcagcctttataacatatacggaccgacggaaaatacgacattttctaccttttacgaaatcaggcacgatttttctcagccgatcccaatcggaaaaccgatcagcaattcaaccgcgtatatcattgataaaaatggcggacttgcgccgatcggcgtgcctggtgagctttgtgtcggcggggacggggttgccaaaggctatttaaacaggcctgacttaacaagtgaagcatttgtcagccacccggttcatcctgaagaaaagatctacagaacaggggatttggcacactggctgcctgatggaagcatcggatacatcagccgtatcgaccgtcaattcaagattcgcgggaagcgtatcgagccggccgaaatcgaagcgcggctgactgaaattgatggaatcagggaagcggcagtcatcgtgtcagacgaaggacaagaagcaaccctttgtgcgtattatacaggcgcacatgctgaagaaagagccattcgatccctattggccaggtcgcttcccgactatatgattccgcagtatgtgatgaagcttgaccgtatgccgcttaccgcaaacggcaaagtggaccgccgcgggctgcctgcgccggaacggaaaaaagcttcatcaaaagccgttccgccacgaaactgggtagagcgtgagctgatcgacatttggacgccgatcctcggctgcggggagctgggcatacaggatgacttctttgagctgggcggccattctttgaaagcattgcaagtgattcatcagctgaagaccaggcagcagatggacgtcccgattgaaatgatatttgaatatccgacaattgaacaattggctgaaaagctgtattcaaacacactgtcagaagctgccgaacagcatatcagcagactgaatcagccgaaaggccgcaatcttttctgttttccgcctatctcaggtttcggcattttctttaaagatctggcggcggcattaaatggacgggctgctgtgtacggttttaactttattgaagaagacagcagaatggaacaatacattgataaaatgctggaaatccagccggaaggcccttatatcctcttcggatattcagcgggcggcaatacggcattcgaggctgcaaaagcgatggaaaagcgcggcttagaaatcagcgacgtcattatcgcagacgcgtacagaaagcttgacgcactgccgccgcagccaacaaacgcaacagccgaaaatgtcccggaagccgtcagggaagcggtcatcagaaaaacagagcgctatcaaacgtactgggcggaactgataaatgacggccaaattgcggcaaatctccattttattgaggccggcataaaggaagagcacagtgataagaccgagccgatgaaatgggaaggcgccacaacgggagtctaccaggaatatcagggcgagggagcccataaagatatgtttgagcccgagtttgcacacaaaaatgccgaggtcatactggacatcatcgcaaacagcggaagacgcttggcgcggaatctgtaacatccggcagaatgactgaagaagacaaagggcaagataggggaatcacactcagtttttttggaggctttgagatgacgaacctatcttggcttacgtatgtaatgattattcttgccagctaccggctgacccatttgatcgtatttgataagattacggaattcataagaaaaccctttataaagcaagaaaaaaccgtcgatcaaaacgggcgcgccgtccaaaaaaaagtcccttcctccgcattcggttatatgctgcaatgttattggtgtgcgggcgtctggtgcgccatattgatcggcatctgctatttggtctggccccgctatgcacatccggttattttcattttgtccattgccggagcgcaggccattcttgaaacatgcgtcggcgtcggaacgaaggtcattgacgtgctcgccgccataaaacataaaaagtcctgaagcgttttgattcgctttaggacttttttctttcccttttaggctgagaggagcaaagcaggctttctgattcaccgcccggaatgcttcggaataccgtaaagcagagagggggaaaaacatgaaaagctgccgttttagcatgatatggtttttggccgttgtactgacagccggcatctttacgttctcagcatccgcacaagcaagcggcactcagccggagagagaaatgcgagccgtatggatcgcgtctgtcaccaatatcgactggccctctaaaaaagggctgtcaccggaagagcaaaaaagagaatacagcaagctgctggatgacgttcagaagatgggaatgaacgccgttatcgtccaaattaagcctgcggctgatgctttttatccatcagattacgggccttggtcagagtatctgacaggaacccaaggcaaaaatcccggctacgatccgcttgcttttttagttgaagagacacataaacggaatcttgaatttcacgcttggttcaatccttaccggatcacgatgaatcacacaaatttgaatgcgctttcagatgatcatcccgcgcgttcccatccggactgggtcgctgcatacggaaaacagctgtactataatccgggcattccggaagtaagacaatttataacggatggaatcaaagaagtggtcagccgttatgacattgatgcggttcatatggatgattatttttatccttataaaattgccggacaggaattccccgatcaggcggaatacgaacggtacggaaaagctcactttgcatcgattgatgactggcgcagggataacgtcaaccggcttgtaaaagaaatcaacgaaaccatcaaacgagaaaaaccttatgtcaaattcggaatcagcccgttcggcgtatggagaaatgccgcagatgatccgacaggctccgaaacggccgccggggtgcggaactacgatgacttatatgctgatacaagagaatggatccaaaaaggatacattgattacatcgcaccgcaaatttactggagtatcggatttaaagcggcggcatatgacgtcttagcggattggtggggaaaagaagtgaacaatcggccggtgcatttatatatcgggcaggcagcttataaaatcaacaacaatactgatccggcctgggccgacccgggggaatacggaagacagattacgctaaacagaggatcagcatggataaaaggcagcatgcatttcagtttaaaggatttaaaccgtaatccgctcgatgtgaaaaaccgtttgatcaatgacatgtacagccggcccgcattaattcccgagatgccttggctcggacattccgctttaaaaaaaccggctgtcaaacgggcggagaagaacgcttcaggccatacactctatatcgaagatgcgaaatccaacggtaaaaaaacggcttattacgccatttaccgcgcagaaaagggaaagcagccttatttagtggatacagtcagaaaaacatcgtcacggacgcagacattttcagatactgttattcgggcggaagaagcatgcacctatatcgttacttccgttgacaggcttcaccatgagagccgtccctccgcaaaacggacgattaaatagccattattaataaaactgacagttgcggcactgtcagtttttttttgcggcggatgagtccgaatgttcagactttatttggatggaatgaataaagacccccattaataaaatgtagaaagcagcagaaggaggaaggttaatgaattttcaactgacaaaagaacagcagatggtgcgcgaaatggtcagagatttcgccaaaaatgaaattgccccgaaagcccatgaggttgatcaatcagccgtcttcccgatagacacatttaaaaaaataggcgaactcgggctgctcggaattccgtttccggaagaatacggcggggcgggcggtgacaccatttcatatgcagcagcggtcgaagaaatcggaaaagcctgcggcagcacggggctgagctacgcggcagccgtgtcactcggcgcaagcccattatactatttcggtactgaacagcaaaagcaagaacatcttgttccgcttgcttcgggaaaagcgctcggatcattcgggctgacagagccgaatgccggttcagatgccggcggcacccagacaaaagccgagaaaaagggcgatgactatgtgataaacggagaaaaatgctggatcacaaacgcaaattacgcccgcacggtcattgtcaccgccgttacgggaaagaactccgccggaaaaccgatcatttcagctctcatcgtcccgacagacacaccgggatttacgatcacaaatccgtacgacaagatgggtgtgagaggatcggatacggccgagcttgtgctggaggatgtcagggtgcctgccgataacctgctcggtgatcctgaaaaaggttttaaacaatttttatatacattagacggcgggcggatctcgattgcggcactggctgtcggtatcgctcaaggcgcactggaggcgtcgctgtcatatgcgaaggaacgcaagcagttcggcagtccgatatcgtcatttcaagccattcaatttaagctggccgatatggcgatggaaattgaccttgccagacaaatggtgcttaaagcggcatggctgaaggatcaaaacctgccatttacgaaagaagcggcattcgccaagctttatgcttcagaaatggccgtcagaacctgccttcaggccatccaaattcatggcggttccggttatatgaaggaatgcggtgtcgaacgtatgcttcgtgacgcaaagctgatggagattggagaaggaacatcagaaattcaaagaatggtcatcgcaagacagcttttgaagtgaaatgaaaacgtttactaagacagggatggaagggggcaggtcatatggctgaacttatccatttaacagccggaaagctgcttgagcggaccgcggagctttttccggatcatgaagcggttgtttaccctgagcgcggccttcgttatacgtatgccgagtttgaccggttatgccggcaaaccgcaaaagggctgatgaaactgggaattgaaaaaggagatcatgtggccatatgggcatccaacataccggaatggctcgcggcgcaatttgcaacggcgaaaatcggcgctgttctggtcaccattaatacaaattttcaaatcgcagaactcgattacctgctggcgcattcagacgtctcggccctgataatcatggattcctaccggcagacatcttatgttgagatggtgaataagctgattccggagctgaaaacttgtgagcacggcaggctgcgttcgaaacgttacccctttttacggacggtgttatatatcggtgataaaagtccgcccgggatgcaccgctgggattctttgctgaaggaaggcgaagctgtaacggatgcagcgcttgacggaaggatggacagcctgaaaaaggatgattgcattcatatgcaatatacatcaggtacgaccggatttccgaaaggcgtcatgctctcacattttaatatcgtaaataacgcggccaatatcgcagaatgcatgaagcttacttcaagtgaccgtttatgtattcccgtgccgtttttccactgcttcgggtgtgtgcttggcgtgctggcatgtgtttccgcgggtgcggcgatgattccgatcgaacagttttctccaccggccgttctgaaaacggtggagcaagaagcctgcacggctctgcacggtgtaccgacgatgtttatcgccctcctaaatgacagccgcttttctgaatatgatctttcccacgtccgaaccgggattatggcaggctcgccatgcccggcggaagtcatgagagaagtgatcggcaaaatggggatgaccggcattaccattgcctacggacagaccgaagcatcacctgtcattacgcagacaagaacggatgattcatttgaaagaagagtggaaacagcggggcgcgcgcttccccatatcgaagtcagaatcgttcggcccggaacatcccaagaagccgaccggggcgaacaaggagagctctgcacccgcggatatcatgtcatgaaaggttactataaaaatcaagaagcgaccgaagaagcgatagacaaggacggctggctgcataccggtgatttggctgtcatggacgaggacgggtactgcaaaatcacgggccgtctgaaagacatgctgatcaggggcggcgaaaatatctatccgcgcgagattgaggaaatgttatatcggcatcccgcagtggcagacgttcaggtcgtcggcgtgcctgatccgaaatacggagaagaggccgcggcgtgggtcaggctcaaagacggacaaaccgcttccgcagaagacatcagaaccttttgcaaagaacatatcgcccgctataaagtccccaggtatgttttgtttacagatgaatatccaatgacagcctcaggaaaaattcagaaattcaagctgcgggaaaaaacgattgaagagctcaagttaacttaatgaaaaaggagtgcttcacatttgtttaaaaaagtcctgattgccaacagaggagaaatcgccttaagaattatccgcacctgcaaacgtctcggcatcccctcggcagctgtgtattcagaagccgacagggacgcgctgcatgtaaaagcggctgatgaggcctatccgatcggtaaatcgagagtaaatgaaagctatttacatatcgacagaatcatagaagccgccaaatccgccggagcggacgccattcatccgggctacgggctgctgtcagaaaacagcctgttcgccgaacgctgccggaaggaacaaatcacatttatcggcccgcccggtgatatcatcgccaagatgggcagcaagatagaagcccgaaaaacgatgcaaaaagcaaaggtcccgatcgttcccggtgtttcagagccattgcccgatgttcactccgccttagccgaagcccgtgccatcggctttccggttatgctgaaagcgtctgcagggggaggcggaatcggcatgcagatcgtacattcagaagaagagctggccaaagcgttcgaaggcaatcaaaagcgggccgcgtccttttttggagacggcgcaatgtatatggaaaaggtcattgaaaatgcccgtcatattgaaattcagattctcgcagattctttcggcaacaccgttcatctgtttgaacgtgactgttcagtacaaaggcgccaccaaaaagtgatagaagaagcgccgtcgccgtttgttgacgatgaattaagacaaagactcggtgaaaccgccgttaaagccgctaaatcgatcggctaccaaaatgcaggcacaatagaatttctcgtcgaccaaaagaaacaaatctattttttagagatgaacacaagactgcaggtggagcatccggtgacagaagaaattacaggactggatcttgtggaagaacagctgaaaatcgccgccgggcaggcgctgactttctcgcagaaagatatcaaccaccgcggtcatgcgatagaagtgcggatctatgcggaagatccggtcaccttttacccgtcacccggtaccatctcgtctttttccgttttaagacacccgtcagtgcgacacgaatgcgccgtcgaaaagggaagcgtcatttctccgttttacgatccgatgattgccaaaatgatcgtcacggcgaatacgagaaaacaagccattgaacaactgaaaaccgcccttggcgaatatcatgtagaagggattaaaaccaacattccgctgcttacaaaaattgcacattcagaagtgtttgaaaagggtgaggcaacaaccggttttttacaaacaatgaacgagggggcgtcaaaatgagcgtcataaaaattcagatggcgggaaacctgtggaaaattcatgtgaagcccggtgatgtcattgaagaaggacaggaagtggccatcttggaatctatgaaaatggaaattccgattatcgctgatgcagcgggtacggtgaaagaagtgaaaaaatcagaaggtgatttcactgatgaaggagaggtcctgattgaacttcaataaaacgggaggtgcagcatgaactgtccggaatatgtccgcatcaatgaagtaggaccgcgtgacggcttgcagaatgaatcggcgtgggtggatacagaagataagattgagtggatcaatatgctgtcaaaaacaggccttccctatatcgaagtgacatcattcgtgcatccgagatggattccggctcttcgtgacagcctggacgtcgcaaaaggcattgccaggtctgaacatacggtctacgcggcgctcgttccgaacctcatcggactggagcatgcggcagaaggcggaatcgatcaggcctgtgtatttttatctgcaagcgaaacccataaccaaaaaaacgtaaacaaaccgattgaccggaccgttcaagagctcaggcgggttattactgaagcaaaagctgaaaaaatggcgacgagagcttatctgtccactgtgttcggctgtccgtacgaacagaacgtgccggtcgaacaagtcatccgcctgtcagacacactgctcgaaatgggtgttgatgaaatatcgctcggcgacacgatcggcgcggcaaaccccttgcaggtcatatccgtgcttgaagcccttttgccgagaattcccgcctcaaaaatcgcactccatttccatgatacaagaggaacggctctagcgaatatcattcccgctcttgatatggggattacatccttcgatacttcctcaggcgggcttggcggctgcccgtacgcccctggatcagcaggcaacgctgccacagaagacgtcatttatatgctcgaacaaatggggattgataccgggacggacatgaataaacttcttgatgccgcccgctggatcgcggataaaataggcaaagatctgccaagcagaaatctgcaggcattcagaacgaaatgagaaaggagaagccatgggagattgcgtcttgtattccgtctgtcaagaaacgatcggtctgatcacgctgaaccgcccgcatgcggccaactcgctgtcttcagaaatgattgatcatttacagcgtgtgattgaagacatcaaaaactcgccatccattcgctgtgttattctcaccggctccggaaacacattttgcgccggcgctgatttaaaagaaagagctgggatgaatcatgaacaagttaagcaaagcgtcaggcgtatcggtgaaacggctgcatccattgaagctctcccgcagccggtcattgcagcgctgaacggaaccgctgtcggaggaggccttgaactcgctctcgcctgcgatatcagaacagccgtcagccgggcgggcctcggccttcctgaaacagggcttgcaatcattcccggggcgggcggaacgcagagactgccccggcttatcggccccggcgcggcaaaagaattgatctataccggccgaaggctttctgccgaagagggaaaagacatgaagctgatcgagcatgtttgtgaagccgatgaacttatggaaaaagcaaaagcactggccggccgcatcgccgctaatgggccgatcgccgtcagacaagcaaaatccgcgataaacaagggtctggagacagatctcaatacagggctcgaaatcgaacgaaaagcatatgaacaagtcatccctacacttgacagagaagagggcctgcgcgcttttaaagaaaaaagaccccctgaatacaaaggaaaataaaacatggagggactcggatggattacgaaaaagaacggcagacacgcagcaaaacgattgaaaagggaggagccgcgaaatatcatgcaagcaacgaaaagaagggaaaactttttgtaagagacaggctgaagcttttattcgatgacggcatatccgttgaagacgcttttttcgccgagtgcatgtcagacggactgccggctgacggggtcgttaccgggatcggaaccatcggcggcagaaccgtttgtgtgatggcaaacgactcaaccgtaaaggcgggctcgtggggcgcgaaaacggtggaaaaaatcatccgcattcaggagacggcggagaagcttcagtgtccgctcttgtacttagtcgattccgcaggtgcgagaattacggatcaggtcgacatgttcccgggcagaaggggagccggccgcatcttttataatcaagtaaagctgtcgggccgcattccgcaaatctgtttattgttcggtccttccgctgcgggcggcgcttacattccggccttttgcgacattgtcattatggtcgaaggcaatgcatccatgtacttaggttccccgcgcatggcagaaatggtgatcggcgagaaagtatcgcttgaagaaatgggcggcgcccgtatgcattgttctgtatcaggctgcggtgatctcctcgccccgacggaacaggaagcaatcatgatggcgcagacatatctcagctactttccggcaaattatactgaaaaagcgcccgtcaacaaatctaagaacccgaaagcttttgaaaaaccgctctcagatgtcatcccggcacatcaaaacgcaccgttcaacatgatggatttaattgaacgtgtcattgatgaagactcgttttttgagattaaaccgttatttgcgcaggaattaataacggggctcgcgcggattcacggacagccggtcggcattatcgccaatcagccgcgtgtcaaaggcggagttttatttctcgattcggcggataaagccgcaaaatttatcgctttgtgcgacgcattccatattccgcttctgtttttagcagacattcccggattcatgatcggaacgaaggtggagcaggcgggcatcatcaggcatggcgcaaaaatgatctccgcaatggcggaagcgactgttccgaagctttccgttatcgtcagaaaagcctacggtgccggattatacgcgatggcggggcctgcttttgaaccggactgctgtttagcgcttccgactgcgcaaattgccgtaatgggtcctgaagcagcggtgaatgcggtctacgcaaacaaaatcagcgagctggcccctgaagaaaggccggcttttattcaagaaaagcgtgatgaatataaggaagacattaacctttaccggcttgcctctgaaatggtgattgacggcattgttcctgctgattccttgcgggaagaactcaataaacgcctcactgcttacatgtccaaacaactgacattcacacaccggaaacaccccgtatacccggtataaataaaaaaagactgcatagatccggctcgcagccgttcttatgcagtcttttttcacagtcttgatctcattttcttcacaacaaaataaacaacaataaatacgagagccaatataatgatcggagttgtatacattccggcatagctgtctacgtctttccactgtcccccgagctgatacccgagataaacgaaaatgacagaccacggaataatggcaagcgtcgtcaatatgacaaacttggaaagaggcattttcgcaaggccggccgggatggaaatcgcatgtctgacgaccgggataaaccgcgccgagaacacaacgccggcgccgtaacggcgaaaccagttttccgcaacatcaacatgatgctttttcagaagtaagtacttgccgtacttgtccaaaaacggccgtcccccataacgggcgatccagtatataaagcactgcgcgatcgttcccccgatcacaccggcgacaatggcgccgataaagctgatcgtgccttctgacaccatatagcctccgtaagccagaacgatttcactcggaatgatttcgatcattaatccgagcgcaatccctaaatagcccatacttgtcagccaggataatatttcactaataaaattgcccacactgttcacaacctctttatctttttacccaattatatgactgattgacaagcaaaatggttacaaattattttttaacgcacgatttcttcagattctctttttaacacctcttctaaataagctaaaagtttcggtctcatttcttcccgcagaagcccgatctccgtgccggccttaaaacagccgaacttatctcctatatcaaaccggcttccttcaagctcccgcgcgtaaatgcttcgggtgcggcatacttcgcgcagcgcgtctgtcaattggatttcgctgcccgcgcctcttccgatcgtcttcagcgctttaaaaatggcaggggttaatatgtaacggcccaacacggcaatatgagagggcgccttttcaacggccggtttctcaatcagatcctcaacccggtacacatgaccgctctgccgccccgtctgtataataccatatttgctgacatcagcaggatcgacgggctgtacgccgatcgtttctgtgccgtgttggttatagacgtctatgagctgtgaaagagcgggagtgtcagataccataatatcatcacctaatagaacggcaaaaggctcatctccgataaaatgctccgcacacagcaccgcatggcctagtccgagcggttctttctgacggatgtaatgaatattggccaaatcggcaatccgctgcatttccttcagtgtctctgacttgcctttttccttaagattgatttccaactccgccgaccggtcaaaatgatcttcaatcgagcgtttgtttctccctgtaataatcagtatatcttcaattcctgactctcttgcttcttcgacaatgtactggatggccggtttgtcgacgatcggcagcatttctttcggctgcgcctttgtcgccggcagaaatctcgttcctaaacccgctgcggggatgaccgcttttctcactttttttctcattcatcttcactcctgatcctgtatgtttttcagcgaatctccaaatacccagattcggtttccgataaaattcatcatcattccgccgatagtggcggcgagcttactcaccaaaagcgaacagccgcctttttgaaacgcgtacagcagcaaaaaggtgattcccgacgctgcaagattaatgatgagaaagcgcacgatctctttcccgtcagccttgtgttttacacgaaacgtccacttccggttccacacatagctgttgatgatccctgccgaataggagcagatctgcgccggcagataggggacaaggcaagcggtgagaagaaagaagacaccaaaatcgatcagcgtattgccggcgcccacggtgcaaaaacggcctgctgtctttactttttctttcagcataacggcatccggttttgacctcccttcataagtaagatgcggatcgctgtcctatttgttgatatggattactttagcggacagtgttgaataaacaattactaaaatatgaacaaaacatgaaaacgtaatgaggctttgtaaaacccattaagttaacagttttatattttaggttgacatattacgtgcaagacactaatattctgtattagtgttaaccttttattattttggttaacattaaatttcgaaataaaagaaaggagggaaatttcatgcaggaagagacctattacagcgtcagaatgagagcttcccgaaacgccccccatgagcagggcggaaaacatatttccggcggagaacggctcatcacttacagcggtttacaggaagcggtagatggcttattacataaaggcttctcacactcaagagggatacctgattttatgcagattcagcttgaaagcgttcatgaaccgatcgaaacgatccgccctttgccggttgccctccatcaaacagacacgccggaaaaaggacaagcaatcgcccgcaagcttctgcaaaaggcggggattcctccgcacatgatcgagaaagcgtacgaaaacatttcggaatatgcagaagcaagaggagcggtcctgtttgatatccgggcaggaaaacgcattgactgcagagggaatagaggtgtgcgggtatcccgagtggattggccgtcacctgattttcaaaaatgggcttttactcacaacatgccggaaaattcacgaataaaagaagcacatgccatcgcggcaaaagtttgcgcacatccgggaattattgccgaattgtgctggtcagatgaccctgattacataacaggttacgttgctgcaaagaagctgggatatcagcggattgccaagatgaagaatgccggagatgaaagcggatgccgggttttctttactgatggctccatagatacggagagctgtatccattttttagagaagcagcctgtattcattcagcgggaggagaacatatgaaacaatcaatgattgaaaaaagcaaacagcatctttggctgcctttcacacaaatgaaagattacgatgaagatccgttcatcattgaaagcggaaacgggatcatgctgaaagacatcagcggaaaagaatattatgacggcttttcttcagtatggctcaatgtacacggccaccgcaaaaaagaaatggatgaagcgattcaaaaacagcttgaaaaaatcgctcattcgactttgctgggtatgacgaacgttcccgcaacagaacttgccgagatgctgacgggcatcacaccggaaaagctgacgcgcgttttttattccgacagcggagcggaagcaatggaaatcgctctgaaaatggcctttcaatactggaaaaacgtagggagacctaagaagcagacgtttatttcgatgcagaacggctatcacggcgatacaatcggagccgtcagcgtcggctccattgaactcttccaccatgtgtacggcccgctgatgtttgaaagctacaaagccccgattccttatgtatacagatctgaaagcggtgaccccgtacagtgccgggatgaatgccttcacgcgctcgaacagctgcttgcaaagcaccacgaagagattgccgcacttacgattgaatcgatggtgcaaggcgcatccgggatgatcgtcatgcctgaaggctttctggcaggcgtacgaaagctgtgtacggcatatgatgtgttaatgatcgttgacgaagtggcgacggggttcggccgcaccggaaaaatgtttgcctgtgagcatgaaaacgtccagccggacttgatggcggcagggaaaggcattacgggaggctatttgccgatcgctgtgacgtttgccacagaagccatttatgaagccttctacgatgactacgacaaaatgaaaacatttttccacggccattcctatacaggaaatcagcttggctgtgccgcggcaattgaaaatctgcgtttattcgaatcagagcgcatcgttgaacgagtcgccgaaaaatcaaaaacggctgcggaatttcttcatgatctgaagctgcttcctcatgtcggcgatgtccgccagctcggtttgatgtgcggcatagagcttgtgcaggataaggggacaaaacagccttatccgcctgaaaagcggatgggatacaaggtgtccttgaaaatgagagagctgggtatgctgacacggccgctcggtgacgtcatcgcctttcttccgccgctcgccagcacaaccgaccaattacaagccatgatctccattatgaaagaagcgatagccgaggtgaccggccgtggattttgacggatggctcctcggaaggctcgatgcggtgaaaagagacgggctgtatcggacgctgcgaacacaggaaaccgctcttaaaaccaaggggcaaaagcggcagacctgggcgtccaatgactatttaggtctgtcaaaagatgaacggctgatcacagccgcgcaaacagcgctgagccggttcggagcgggaagcggcggctcacggttaacgacaggaaatactgtgtggcacgaaaaacttgagcaaaaaatctccgactttaaacagacggaagcggctttattattttcaagcggttacttggcgaatatcggcgtgcttgcctcactgcctcaaaaaggcgatgtcattttaagcgatcaactgaaccatgcgagcattgttgacggctgccgtttatcaaaagcggaaaccatcgtgtaccgccatattgatatggctgatcttgagaaaaaacttgcctccgtccagactcggaaccgccgctttatcgtcacagacggcgttttcagcatggacggcaccatcgcgcctcttgaccgaataatgccgcttgcaaagcagtaccaggcatttgtgatagcagatgacgcgcatgcaaccggtatactcggggaaaacggcggaggaaccagtgactatttcggtgtttgtcctgatgttgtcatcggcacattaagcaaagctgtaggaacggaaggcggttttgccgcgggatcaaacatttttattgattttttgctgaatcaggcgcggacgtttatttttcagacggccctcccgccgtcaatttgtgcggcttcgcatacggcatttgacctcatatcagatatgcacgatacgcgccgtgagctgcagtcgtctgtcaaaaagataaaaacgcgtctggccgatatgggctttactgtaagaggcggagatacaccgattatccccgttatcatcggtgatgcaaaaacagcggtttcagccgctgcgctgcttgagaaaaagggaatctgcgccccggccatccgcccgcccgccgttccggaaggcgaaagcagaatcaggctgaccgttacggcggatcgcagcttacaggacatagacgagctgacggaagcatttgattccattagaaaagagctgaatataaacaaatgagaagtttttttgtcacaggaacagataccggcgtcggaaaaaccatcgtttcttgcggacttgccgcggcattcaggcagaaacaggcggatatcggagtgtttaaaccgtttttaagcggcgtgccgcggactcatccggaaagtgacacctcgctgttgaaaaacatgtcacaaaccgcactgtctcatgaagaaatcacgccatttgaatggaaagagccgcttgcgccgtacacggccgccatgcttgaggggaaatccgtgagcatggatgaagtcatggcccactggagtaagatcaaaaatcgtcatgagtgtttcatcgtcgagggggcaggcggcatttccgttccgcttggtgaaaattacttagtcagtgatttgataaaagccttggaattaccggcagtgattgtcgccaggcctgatctcggaaccatcaaccacacatatttaaccgttgaatatgcgaaaaacatgggaatagaggttctcggtattattatcaacggcgtaaagagccggccggggctggacgagaagacaaacccgagcatgattgaaacattatgcaaagttccgattttgggaatcacaccgaagctggatcacgtttcaccggaaaacattcaacacatgattgagaaacatatagatgtttcctctttcatgaatctgacacaaatggggagataaacatgaatcaatggatggatcttgcagagagagttctggacggggcggaagtaacgaatcaagaagcgctggccattttaaattgtcctgatgaggatcttttattgctgatgcatgccgcttttcatatcagaaaacgattttacggaaaaaaagtaaagctgaatatgattatgaatgcaaaatcaggcctgtgtccggaaaattgcgggtactgttcacaatcttcaatatcaaaagcgccgatcgagtcttatcggatggtggataagcatatattgcttaagggggcaaaacgcgcccatgacttgaatatagggacatactgcatcgtcgccagcgggcggggaccgtcaaacagagaagtagatcaagttgttgatgctgtcaaagaaattaaagaaacttacggtttaaaaatctgcgcatgcctcggtctgctgaagccggaacaggcagagcgcctgaaacaggcaggagtagaccggtacaatcataacatcaatacatcacaaaggaatcactcaaacattacgacttcccacacgtatgacgacagggtcaatacagtggaaacggcgaaacaatcggggatgtcgccttgttcgggtgtcatcgtcggcatgaaagaaacgaaacaggacgtcattgatatggcgaacagcttaaaagcgcttgacgccgacagcatcccggttaattttctgcatgcgattgacggaactccgttagaaggggtaagcgaattacatccggtgtattgcctgaaagtgctcgccttgttccgttttatcaatccgacaaaagaaatccgtatctcaggaggccgggaagtcaaccttcgttcgctgcagccgctgggactttacgccgcaaattcgattttcgtcggagattacttaacgacagcagggcagcatgaaacagaggatcatcaaatgctccatgatttagggtttgaagtcgaatccgttgaagaaatgaaagccggcctgcaatccgcctgcaatacggaggtataagatgacggcgggcctatcgactgcacatccgtccctccatgcggattcggatttttggaatgacccttacccgttttatgaaaaactgcgtgccattgatcctgtttataaaggaaccgtattaaaacatccgggctggtatgtcaccgggtataaagaagcggcagcgattttgaaagacacccggtttaaaaaccgcgtcccttttccggaagcttcaacgaaatatcaaaatctatctcatatccagcacgatatgctgttatttaaaaatcaatcagaccataagcggatgcggatgcttataggtaaagaatttaccgcaaagacggcggaatcacttcgcccctgtataaaagaaacggttcatgacttgttggatcaaatccaaaacaaaaaaaacgcagaccttgtttcagagtttgcctttccattggcaagcctcatcattgcggagatactcggagtgccgaaagaggagagatatcaattcagacaatggacggcagacgtcattcaggccattgatcttacccggtcaagaaagatgttagtcagagcaagcgacaccgcaggcaggctgactgcatatttcagagatttgattcacgagcggaaagcacatcctcaggaagacttaatcagcaggtttattatgggggaacagctttcaaaagacgaagtgctcgcgacatgtatcttacttgtcatagccggacacgagacgacggtaaacctcatgagcaacggtgtgtttactttattgaaacaccctgaacagcttagcgcactgagagaaaacccctcgcttattgaaactgctgtcgaggaatgtctgcgctacgacagccccgcgcagctgacggcacgcaccgcttcagaagactgtgaaataaatgggaagaccataaaaaaaggagagcaggtatatatccttttaggggcagccaatcgcgatccaagcatattcgatcagcctcataaaatggacatccaaagaaaaccgaatccgcatcttgcattcggaaagaacgcccatttttgcataggctcctcattagcgcgcatcgaagcacaaattgcaattctcacactgtttgagcggatgcctaagcttcggctggccgcacaccgccttgaataccgcaagctcattggttttaggtcgctcaaagagcttccggttgtccttggctgaatgaccatgcaggagggccggattttatcggttcctcttgcaggaaataaatgaaagaaaaaagaatacatatttataaagcaaaaatcctctctgatccatctcactatccctaaaaaaactcgctgctcagccattcaatatcatacagcaagaatctccttttctttcgccaaaacggaaaattcaccatgatgcacattttttcagcctcagaaacggtgcaaaatcggcatgttttctgctttattttcttgatctttgtaagcgcttactaatattgagcagaaaagagggggatttgtggacattgttattattttattggcattaggcatgctgatgtttgcggcttaccggggcttttcagtcattttattcgccccgatttgtgcgctgtttgccgtgctcctgacagatccaagcttcgtacttcctttcttctcgaatatatttatggagaagatggtaggatttattaagctgtattttcccgtatttcttttaggggccgtttttggcaaggttgttgaaatatccgggctcgccgagtcgattgcaaaaacaatcgtcaggcttgtgggagcaaaaagagccattctcgccatcgtcttaatgggtgcgattttaacgtacagcggcgtcagtctcttcgtagcggtgtttgccatttatccgtttgctaaaaacctatttattaaagctgatattcccaagcgtctgatacccggtacgattgcattgggcgcgtttacttttacaatggatgcgcttcccggcacaccgcaaattcaaaatgtcattccgacagctttttttaaaacaaacatttatgccgctccctggctcggactgattggcgcagcatttgtgcttacggccggaatgatttatttagaatcccggcgcaaaaaagcggccaatgccggagaaggctatgctggatttcaatctgaagtttccgctgcagaggattcctcaagtctggctaatgaaaaacatacgcctgttttaccgcaggaggcagaacccagccccgcgcggcaagtgctcgcctttgttccgcttatccttgtggggatcatgaacaaatgcttcacgatgtggctcccgcattggtaccctgacggatttgattttgcgcagctcggtttaaaagcgttcgggaagattgacctttcctccgtcactgcgatctggtcagtagaactcgcactgctcatcggaatcatgacaacgattttgttcgattggaaaaaagtgctcttcaatttgaaagaaggactgaatgagggcatcgggggtgccttgctggcgtcgatgaatacaggagccgaatacggatttggcggcatcattgcggcgcttcccggctttaaaatggtcagcagcggcatatcgcagacgtttactgatccgctcgtcaacggagcggtgacgaccactgcgcttgccgggattacaggatcggcatcaggaggaatgggcatcgctttaagcacgatgtcagcagcatatacagaagcaatcaatacattccacattccgccggaggtcatgcaccgggtgatttcgatggcctccggcggaatggacactcttccgcataatggcgccgtcattacgctgctcgcggtcaccgggttgacccaccgccaatcctacagggatatctttgccattaccgtcattaaaacagcagctgtgtttgtcatcatcgccatttacagtctgacgggccttgtgtagccaaaacagaaaggggaaacgaatatgggaaaaggaaaagtgatggactcttataaagatgctgctgcactgatcaaggatggagacaccctcatcgcaggaggcttcggcctgtgcggcattccggaacaattaattctcgcgatcagggacagcggcgtgaaaaacttgaccgttgtcagtaataactgcggtgttgatgattgggggttaggcctcttgcttgcaaaccggcagatcaaaaaaatggtcgcatcctatgtcggagaaaacaaaacctttgaacggcagtttttaagcggggagctggaagtcgaattggtgccccaaggaacgctcgcagaaagaattcgcgcgggaggggcgggcattccggcgttttatacacctgcgggcgtcggaacatcagtagccgagggaaaagaacataagacatttgacgggcgcacctatcttctggagaaagggattacagggaacgccgccatcataaaggcctggaaagccgatcctctgggcaacctgatgttcagaaagacggcgagaaatttcaatccgctcgctgcaatggcaggcaaagtgacgattgcagaggctgaagaaatcgtcgatgccggagagcttgatccggatcaaattcatacgccgggtatttttgtgcagcatgtgctgcttggcgggattcatgaaaaacggattgaacgccgcaccgtccggcaagcatgataaaggaggctgacagaatgagagatagcagaaaacgaatgatcaaacgggctgtaaaggaaataaaggacggaatgaatgtgaacttggggatagggatgccgacgcttgtagccaatgagataccgaatgattataacgtcctgcttcagtctgaaaacggcttgctcgggatcgggccttatccggcggaaggaacggaggaccccgatctgatcaatgcgggaaaagaaaccattaccgaggtaaagggagcctcgtattttgacagtgccgaatcctttgccatgattcgcggcggccacattgatgtagcgattctcggcgggatggaagtgtccgaacggggagatttggcgaactggatgatccccggaaaaatgatcaaaggaatgggcggcgccatggacctggtgcacggagcaaaacggattattgtcattatggagcatgttaataaatatggggaatctaaagtgagaacggaatgtacgctgcctttaaccggcaggcaggtggtcgatcggctgatcacagatttggctgtattcgattttcatgatggccgtatgacgctcaccgaactgcaggaaggtgtaacaatggaggaggtctttgagaaaacagaaggtcattttactgtcagccagtcgttaaaaaacggggtcagaccaaaatgaggaggtgccgccatggattcattgcttattgaaaaaacagccgttgtaacaggagcagccggaggaatcgggcttgaaattgcaagagaattcgcccgtgaaggagcagccgtcatcatctctgatgtaaacgaacaagcggggaaagaagcggcggcaggacttaaagatgaaggctgtgaagcagtcagcatcacatgcgatgtaacaaatgaaaagcaagtggccgacatgctgcagacggtcgagaaacaattcggacgtctcgatatccttgtgaataatgcgggcattcagcatgtcgcgcccatcgaggaatttcccaccgaacagtttgaacggctcattcgtgtcatgctgactgcgccatttatcgcaatgaagcatgcattccccattatgaaaaaacagcaattcggtcgaatcattaatatggcgtctgtcaacgggctgatcggttttcacgggaaagcggcatataacagcgccaagcacggcgtcatcggtttaacgaaagtcggtgcacttgaaggcgcggctgacggcattaccgtcaatgcgctttgtccgggatatgtggacactcagcttgtccgcaatcagttaaaggacatttccgcaacaaggaatgtaccgtacgagcgggtgcttgaggacgtcatctttccgctcgttccccaaaaacggctgctgtcagtgaaggaaatcgctgattacgctgtatttttggccagcgacaaagcaaaaggggttacaggtcaggccgtagtcatggatggcgggtataccgctcaatagttcttatatttttttaaaaacagccgctctgaacggctgtttttttatgcctgaaaaacttgttcactcaataggccgatttactgcccaaccggtatccgggctgggtcattcacatgttctgcggcgtattttgtccttgcagatttttctcatccagatccatttctgcgccgcatttataatcaagcgccatcagtttacaatccttcacagatatacaaatgaatttttacaataaacataaaatatgtaatttctgacacaataatgccaatagccctaaaacatatgaaacatgaagagcgcgacctaagtgatgaagagccggtaacaggctccactccggcttttcatcatctctctttaagactgattttcggtgaaaccccatgttttattttatgaataaatatatctaattcgtttgtaaaatcgaacaataactcctccgaaagtattctatacacatttgttataatcatgctaggatgttagataaagggataatttgtaggatattgtatttctgttcaatatgatcggaggaatctcatgaacaatcttgcctttttatttcctggacaagggtctcaatttgtaggaatgggcaaacaattttggaatgattttgtgctcgcaaagagattgtttgaagaagcgagcgatgcgatctccttggatgtaaaaaaactgtgttttaacggagatatgaatgaattgacaaagacaatgaacgcgcagcccgctattttaacggtcagtgttattgcttttcaagtgtatatgcaggaaataggggtgaagccccgcttcctggcaggtcatagcttaggcgaatattcagcgcttgtctgtgccggcgccctttcttttcaggatgccgttacacttgtaaggcagcggggaattcttatgcaaaatgcggatcctcagcagcaggggacgatggccgccgtgactcacctctctcttcaaacgttgcaggaaatatgttcgaaagtgtcgacggaagactttccggcaggagtagcctgcatgaattcagaacagcagcatgtgatttccggacaccggcaagctgtggaacgtgtcatcaagatggcggaggaaaagggagcggcatacacttatttgaatgtcagtgcgccttttcacagttcgctgatacgatcagcatctgaacaattccagactgtattacaccggtattccttccgggatgccgcatggccgatcatttcaaatgtcaccgcacgcccttacagcagcggaaattcgatcagcgaacatctcaagcagcacatgacgatgccggtaagatggacggaatcgatgcattacttgcttttacacggagtcacagaagtcatcgaaatgggtccgaacaatgttttagccggtctgctgagaaaaacaacgaatcacattgtaccttatcccttaggacagacatctgatgttcacttgctttccaattcagcggaaagaaagaaacatattgtccgtttacgcaaaaaacaactgaataaattgatgattcaatccgtcattgcgcgaaattacaacaaggattcagcggcttattccaatatgacgacggcattatttacgcaaatccaagagctgaaagagagaatggaaagacatgaaaatgagctctcagaacaagagctcaaccattcgatccatttatgcaaattaatttgtgaagctaaacagcttccggcttgggaagaattgcggattttaaaataaagcgcccaggaggggacctatgtataccagtcaattccaaaccttagtagaagtcattcgggaaagaagcaatatctctgatcgcgggatccgttttatcgaatccgataaaaacgagacggttgtctcttatcgccaattgtttgaagaggcgcaagggtatcttggctatttacagcatctcggcattaagccgaagcaggaaattgtatttcaaatccaagaaaacaaatcatttgtcgttgctttttgggcttgtatattaggaggaatgatcccggtgccggtcagtatcggagaagatgatgaccataagctgaaggtctggcgcatttggaatatattaaatcatccgtttctgattgcctctgaaaaagtattggacaaaataaagaaatacgctgcagaacacgatttacaggatttccatcatcaattaaacgaaaaatctgacatcattcaagatcaaacctacgattaccccgcttcgttttatgaacctgatgcggatgaactcgcctttatccaattttcttcaggatcgacaggagatccaaaaggagtcatgttaacgcatcacaacttaatacataacacgtgcgccattgggaatgccctagccgttcattcgaaagactctttcttatcatggatgcctttaacgcatgatatggggctcatcgcctgccaccttgttcccttcataaccggaatcaatcaaaatctaatgcctacagaattatttattcgcagacctattctttggatgaaaaaagctcatgaacataaagccagtattctatcctctcctaatttcgggtacaactacttccttaaatttctgaaaaacgaaccagactgggatttatcccacatcaaggtcatcgcaaacggtgcagaaccgatattgccggagctctgtgacgaatttttgaaaagatgcgcagcattcaatctgaaaagatccgccattttgaatgtttacggtttagcggaagcttcggtcggcgcagcattctctaaattaggtaaagaattcgttcccgtttatttgcatcgtgactatttaaatcttggtgaaagagctgtaaacgtcagcaaagaggatcaaaattgcgcttcattcgtcgaagtgggacgacctattgactattgtcagcttcggatctccgatgaagcaaatgaaagagtagaagacggaatcatcggccatatccagatcaaaggagacaatgtgactcaagggtattataacaaccccgagagtacggaaaaagcgctgacttctgacggctgggtaaaaacgggagacctcggattcattagtgaaagtggtaacttagtcgtaacgggaagagaaaaggacattattttcgtgaacggaaaaaatatctacccgcacgatattgaacgggtcgcgattgaaatggaagaggttgacttaggaagggttgccgcctgcggtgtatatgatcaaaagacacaaagcggagaaatcgtgctctttgttgtttacaaaaaatcacctgaaaaattcgcaccgcttgtcaaagagataaaaaagcatttgctcaagcggggcggctggagcataaaagatgtccttccgatccgaaaactccctaaaacaaccagcggaaaggttaaacgctacgaacttgccagacagtatgaggcagggaatttttcaacagagtctgccgccatcaatgaatatttggagagcagcccggaaacgtccggacagactcccattcatgaaattgaaacggaattactgtctatcttttccgatgtgctcaatgggaaaaaggttcacctcgctgacagttattttgatatgggagcaaattcattacagttatcgcagattgccgagcgcatagaacagaaattcggacgcgagcttgccgtttcagatctctttacgtatccttctatcactgatttagcggcatatctgtctgaaagccgggctgaaatcaagcaggacgtggcagcgaaaccaagccacgtgacgccgaaagatatcgccattatcgggatgtcgctcaatgtccctggagcatcaactaaaaatgatttttggaatctgcttgaaaaaggtgagcacagcattcgagaataccctgcatcccggctgaaagatgcggcggattatttaaagtccatccaaagcgaaatcaatgagaatcagtttgtgaagggcggctatttagatgaaatcgaccgctttgattactcgttcttcggtttagctcctaaaacggctcagtttatggaccctaaccaaagactgtttttgcagtctgcatggcatgcgattgaagatgcgggctatgccggcggcagcatgaacgggagccgtgtcggggtatatgcagggtactcgaaggtgggctacgattatgaacgtctcctttctgcgaattatccggaggagcttcatcaatatatcgtgggcaatctcccttccgtgttagccagccgaatcgcttatttcttaaatttaaaagggccggcggtgacagtcgatacggcgtgctcctcatcgcttgccgccgttcatatggcatgtaaatctttaatatccggcgattgtgaaatggctcttgccggcggtatccggacatcgctcttgccgatctgtatcggacttgatatggaatcttcggacgggtacacgaaaacgttcagcaaagattcagacggtactggcacaggtgaaggcgcggccgcagtcctgctgaaacctctgcaggatgctgttcgcgacggagaccatatttacggcgtaatcaagggaagcgcgttgaatcaagacggaacaaccgccgggattacagcaccgaatccggcagctcagactgaggtcattgagacggcctggaaagacgcgggcattgcccctgaaacactgtctttcatcgaagcgcatggcaccggaacgaagctcggcgatccggttgaatttaacgggctttgtaaagcgtttgaaaagtatacggcaaaaaaacaattttgtgcgattggttctgttaaatcgaacatcggtcatttgtttgaagcggcaggcatcgtcgggctgatcaaatctgtcctcatgctgaatcacaagaaaaatccgccgttagtgcactttaatgaacctaatccgctcattcattttcactcttcaccattttacgtaaaccaggaagctgcagcgttcccatccggtgatgagccgctgcgaggcggagtcagctcatttggctttagcggaacgaacgctcatgtggtattggaagaatatatttctcaaagtgagtatgcgcccgaggatgaacatgggccgcacctatttgttttatccgctcatactgaaaaatcactctatgaactcgcacagcagtaccggcaatatgtatcggatgacagccaagcttcattaaagtccatttgctatacagccagtacgggcaggactcatttggatcatggcattgccatgattgtatccggtaaacaagaactatcggataagctgacccgcctgattcagggagacagaaaccttcccggtgtatacatcggctacaagaatatgaaggaaatgctgcccgctcataaagaagagctgaataaacaagcagccgcactgattaagcagcgtttacgtacgcaagatgaacggatcacatggctgcatcgcgccgccgaattatttgtgcaaggagccgttatcgattggcgcgcgctttattcaggtgaaactgtacaaaagacgccattgcccgtgtatccgtttgaacggagccgatgctgggctgaagctgaccaattgcgcttaaacgaggacgaaaagagaggagaagcggcattgaatatcaatcaatcgaagtcgcacattgaatccttcctgaaaactgtaatcagcaatgcttcggggatcagagcggaggaactcgatctgaatgctcattttatcgggctcggaatggattctatcatgctgtcacaggtcaaaaaagccatcgcggacgaatttggggcagacatcccaatggatcgtttttttgatacgatgaacaaccttcaaagtgtcatagattacttggctgagaccgttccatcgtcctttgcatccgctccgcctcaagagaatgttccggcgcaggaaatacaggtcatttcagaagcacagtctgaatcggatcgcagagaaggtcaacaagagcatatgcttgaaaaaataatcgcttctcagaatcaattaattcaggataccttgcaagctcaattaaatagctttaatttgttgagaaacagcggacatcattccgatgagaaagaatacgctaaagcgcaagagaaatcaattccttctgtcaagcaggggcctccggccgtcactgcagaaaagaaagcggctcaagaagcgaaaccctatgttcctttccagcctcagaacctgcatgaacagggacactataccgcacggcaaaaacaatacttagaagatttcatcaagaaatacgcagataaaacgaaaggttccaaacaatatacggacaacacccgatttgctcatgcaaacaaccgcaacttgtccagcttccgttcgtattggaaggaaatcgtatacccgattatcgccgaacgttctgacggttctaaaatgtgggatattgacggaaatgaatatatcgatgtcaccatgggattcggggttaaccttttcgggcatcatccttcctttattacacaggttatcgatgattcagcccgttcatcattgcctccgctcggcccgatgtcagatgtcgccggtgaagttgccgaccggatccgcacatgtaccggagtggaaagggtcgctttctataattccggaacagaggccgtcatggttgccctgcgtttggcgcgggcagcaacaggaagaaagaaagtcgtggcgttctcgggatcttatcacggcacgtttgacggcgtattaggggttgccggcacaaaaggcggagccgcgtctgcgaatccgctggctccgggtatactgcaaagctttatggatgatttgattattttacattataacaatcccgattcgctggacgtgatccgcagtcttggtgatgaattggcagccgtactggtggaaccggtacaaagccgcagaccggatttgcagccgcgggcatttttgaaagaattgcgggcgatcacgcagcaatccggaacagctctgattatggatgaaattattaccggatttcggatcggtctcggcggcgcacaggaatggttcggcattcaggctgatttagtgacctacggaaaaatcatcggcggcggacagccgttaggggtagttgccggaaaagctgagttcatgaatgcgatcgacgggggtacctggcagtatggggacgattcctatccgcaagatgaggcgaaacgcacgtttgtggccggcaccttcaatactcacccgcttaccatgagaatgtcgttagccgtgcttcgccatttacaaaccgagggagaacacctgtatgaacagctgaatcaaaaaacagcctccctggttgatcggctgaatcgcttctttgaacaatcgcaagtgcctatccgcatggttcaattcggttctttattccggtttgtctcatcgcttgataacgacttgttcttttaccatctcaattataaagggatctatgtgtgggaaggacgcaactgcttcctatccacggcgcataccgcggatgatattgaacacatcattcaagctgttaaagacacggtgaaggatcttcgccgaggcggatttattccggaaggcccggattcccctgatgacggcggacataacaaatcaggggcgtacgagctttcagatgaacaaaaacaattggttatggcatcccattacgggaatgaagcgtccgccgctttaaaccagtccattatgctgaaagtggagggcgaactgcagcatacaccattaaaacaagccgtccggcatatcgttggccgtcatgaagctttacgtacagtgattcatcccgatgacgaggtacagcaagtgcagaaacggatgaatatagaaataccagtcattgattttactgttcacccgcatgaacatcggcagtcggaaattcaaaaatggctgacagaagatgccaagcggccgttccatttccatgaacaaaagcctttgtttagaatccatgtgcttacatcggctcacaatgaacatctgattgtgctcacgttccatcatatcattgtcgatggatggtcaatcgccgtatttgttcaagaactggagagcaactacgcggcaatcgtacaaggaaaaccgatttcaccgaaagaggcagatgtttcgtttcgccaatacttagactggcagcaggcacagattgacagcggccattatgaagaaggggtccgttattggcggcgtcatttctctgaaccgattcagcagccaattctgccgagcacaggttctgtccgttatccgaacgggtatgagggagaccggtgtaccgtcaggcttggacggccattgagcgaggctttaaggtcattaagcattcagatgaaaaatagcgtatttgtgacaatgctgggtgcatttcatctttttctgcaccggcttaccaaacagtcaggccttgtgatcgggatccccgcagcaggtcaatcgcatataaaacagcatgatctgattggaaattgcgtcaatatgattccggtgaagaacacgtctacttcagaaagcactttaaccggttatcttggcagtatgaaagaaagcgtgaatcttgcaatgcggcaccaagccgtcccgataacactggtggccagagagcttccgcacgatcaagtgccggatatgcgtattatctttaatttagacaggccttttcgaaagctgcatttcggaaaggcggaagcggagcccgttgcatacccggtaaaatgcaccctgtacgatttatttcttaacataacagacgcgcatcaagaatatattcttgatttcgactttaatacgaacgtcatcagtccggaaatcatgaaaaagtggggagcgggttttacaaaattgctgcaaaaaatggttgagggagattcaatccctcttgacgccatgatgctgttttccgatgaagaacagcatgatttacaagcactttatgccgaacaccagaagcgggtctcttcaataggaagcaatacagcaaatttcactgaagcctacgaggcgccgataaatgaaacggagcggcagctggcgcggatttgggaggaacttttcggccttgaacgggtcggcagatcagatcgcttcctggctctgggaggaaactcgctccaggcgacgcttatgctttccaaagttcagaagacatttcatcaaaaggtttccatcggacaatttttcaatcaccagactgttaaggaattagcacatttcattcagaacgaaacaaaagtcgtgcacctcccgatgaaggctgccgagaaaaaagcgtattacccgacatcgccggcgcagcaaagagtatatttcctgcaccaactggaaccggatcagctggcgcaaaatatgttcggccaaatatcaataacagggaagtacgatgagcaagccctgatctcatctcttcaacaagtgatgcagcggcacgaagcgtttcgcacgtatttcgacattatagatggcgatatcgttcagaaacttgaaaacgaagttgattttaacgttcatgtccggacaatgagccgggacgaatttgatgcctattcagaccggtttgtaaaaccgttccgcctggaccaagctccgttagttcgtgcggagctgatcaagattgaaaacgagcaggccgaactgctcatcgatatgcatcatatcatttcggatggttattccgtcaacatccttacaaatgaattgctggctttatatcatcagaaaccattaccggacattgaatttgaatataaagatttcgcagaatggcaaaaccaacggctgaatgaggatgccatgaagcggcaggagacatattggctggaacaatttcaagacgaaattcccatccttaacctgccgacagacggttcaaaagcggcagaacggtcttctgagggacagcgagtgacatgctccttacagccggatgtcatccgttcgcttcaagatttggcgcaaaaggcggaaaccactctctatacagtgctcctggccgcctataatgtgctgcttcataaatataccggacaagaagacattgtcgtaggcacgcctgcttcaggaagaaatcatccggatatcgaaaagatcatcggtattttcatacaaaccatcggaatccggacgaagccgcacgccaatagaacgttcacggattatctggaagaagtaaagcggcagacgcttgacgctttcgaaaaccaagactatccatttgaccggcttgtggagaaattaaatgtgcagcgggaaacaaccggaaagtctctgtttaacacgatgtttgtgtttcaaaacattgaatttcatgaaatccggcacaatgaatgtacatttaaagtgaaagaacgaaatccaggggtctctttgtatgatttgatgctcacgatcgaagatgccggtcaacagatagagatgcattttgattataaaccgggacgattcacaaaagacaccattgaacagatcaccagacactataccggcatcttaaacagtcttgttgagcagccggagatgacattgtcttccgttcctatgctgtctgaaaccgaacggcatcaactgctgacggagtgtaacggcacaaagacgccgtatccgcataacgaaacagtaacccgatggtttgaaatgcaggcggaacagagtcccgatcaggaagccgttatttttggcaatgagcggtatacgtacagacagctcaatgaacgggcgaaccgattggcgcggacgttacggacaaaaggcgtacaagcggatcaattcgttgccatcatctgcccgcatcggatcgaactgattgtcggaattttggctgttctgaaagccggcggcgcatacgtgcccattgatcctgaatatccggaagatcggatccaatatatgctgagagattcaagggcggaggttgtgttgacacagcgcagcctgctggatcaattaccgtatgatggtgacgttgtgcttttggatgaggaaaactcataccatgaggatcactcgaatcttgaatcggacagcgatgcgcatgatttggcctacatgatctatacgtcaggttccacgggaaatccaaaaggtgtcctcattgagcatcagggactggctgattatatttggtgggcgaaagaggtttatgtaagaggtgagaaaaccaacttcccattatactcttccatctctttcgatctgactgtgacctcgatatttacaccgctggttacgggaaataccatcattgtctttgacggcgaagacaaaagcgctgtgctttctgagattatgcgggactcaagaatagacatgatcaaattgaccccggcacatctgcacgtcatcaagaagatgaatatcggtggcggcaccgcaatacggaaaatgattgtcggcggagaaaatttaagcacccgtctggccaaaagtgtcagcgagcagtttaaaggccggctggacatttttaatgaatacggaccgacggaagctgtcgtcggatgtatgatttatcacttcgacgcagaacgggacaagcgggaatttgtaccgatcggcactccggctgccaatacggatatttatgtggccgatgcaagcagaaatctggttccgatcggggtaatcggcgaaatatatatcagcggaccgggtgttgccagagggtattggaaccgtccggatttaacggcagagaaatttgttgaaaacccgtatgtcccgggagcgaagatgtacaaatcaggggatttggctaagcggttgaaggacggaaatcttgtatatatcgggcgcattgatgaacaagtcaaaatcaggggacaccgaatcgagcttggtgaaattgaagcagcaatgcataacgcggaagcggtgcaaaaagccgcggttacagtgaaagaagaagaagacggcttaaaacaattatgcgcgtattacgtaagcgacaagcctatagcggctgcgcagcttagggaacaattgtcatcggagcttccggactacatgattccgtcctattttgtccaactggagcatatgccgttaacgtccaacgggaaaataaaccgtaaggcactgccagcaccagaagcgagtctgcagctgacagctgaatatgttccgccgggtaatgagacggagtccaaactgacagatttatggaaggaagtgctcggaataagccatgcggggatcaaacataatttctttgatctcggaggcaactccatccgagcggctgccttagccgccagaattcacaaagagctggatgtgaatctgtctctaaaagacatattcaagtttcctaccattgaacaattggctgacaaggcgttacacatggacaaaaaccgatatgtaccgattccggctgcaaaggaaatgccatattatccggtttcttcagctcagaggcgtatgtatttgttaagtcacacagaaggcggcgagctgacttacaatatgacgggtgccatgaatgtggaagggacgatcgatcccgaacggttaaacgccgctttccgaaaattaatcgcgcgtcatgaagcgttgcggaccagctttgatttatatgaaggcgagccggcacagcgtattcatcagaacgtcgactttacgatagaacggattcaagcaagcgaagaagtagcggaagaccgtgtgcttgatttcatcaaagcgtttgacttagccaaaccgccgctgatgcgggccggactgattgaaattgaacctgcacggcacgtgcttgtggttgatatgcatcatatcatttctgacggcgtgtccgtcaatattctgatgaaagatttaagccgaatctacgaggggaacgaaccggacccgctctctattcaatataaagactttgcagtttggcagcaatcggacattcagaaacggaacatcaagagccaggaagcgtattggctggatcagtttcacagtgatattcctgtactggatatgcctgcggattatgagagacctgccatacgcgattacgaaggcgaatcatttgaatttcttatacccgaacacttgaaacagcgtttaagccaaatggaagaagacacaggagcaacactgtatatgattttattggcggcctatacgattcttttatccaagtacagcggacaagaagatattatcgtaggaacgccatctgccgggcggactcatttggatgtagagccggtcgtgggaatgttcgtcaatacgttagtcattcgcaatcacccggcgggccgtaaaacatttgatgcctacttaaacgaagtaaaagaaaacatgctgaacgcctataaaaatcaagactatccattggaagaattaattcagcatctgcatcttccaaaagattcaagccgcaatcctttattcgatacgatgtttgtgctgcaaaatctcgatcatgctgaattgactttcgattctcttcaactcaagccgtattcatttcatcatccggttgccaaattcgatttgaccttgtcgattcaggcggaccaagacaactatcacggactgtttgaatattcgaaaaaactgtttaagaaaagcagaatcgaggttttatcaaacgactacttacacattctatcggcgattttggaacagccaagcattctaattgaacatatcggattgagcggcagcaatgaggaagaagagaacgcgcttgattctattcaattgaacttttagggaaaagcattatttctttaaattatataaaatgaggtgctccaatgtcggtatttaaaaaccaagaaacgtactgggaaaacctgtttgatgaagaagacggattaagcgcattcccttactttaaagcagcggataaagcgtcgtttgcccgtaccggctaccaggaaaaatgcatctgccgttccttatctccggaagtatctcaaagaatcatgacaatggcgaatcattccgatatggcggcctatctgattttattggcgggtattgaatgcttgttatataaatatacggatcaaacgagcctgattcttggcattccgacggtatcgaagcaaaaagccggccagtcagccgttaacaacattgtcctcttaaaaaatacgctttcaaacgagagtacatttaaaaccgtattcgggcagctgaaagaagccgttaatgattctctgaaaaatcaaaacctgccgtttagaaaaatggttcagcatctgagcgtgcaatacaatgacgagcatctgccgttgattcataccgtcgtttcgcttaacgaaattcattccttgcaatttaaagaagatactgcagccgatacgctgtttcactttgatttggagaacaacgggattcatttgaagcttttttataacggcaatctgtacgatgagcgctatatcaatcaaattgtgtcccatttggatcagctgctgtctgtgattctgtttcagcctcaagccgcgatccatacggcagagatcttaccggaagcggaaaaacagaagctattgtttgattttaacgacaccgtcagagatttctccgggagcagaacagtctatcaattatttgaagagcaagcagaaagaacgcctgagcatgcggccgtcaagtttaaaaacgaccatttgacgtacagggaactgaatgagaaggcgaaccgtttggcaagaacattgcgtaattgcggggttcaacccgatacgttagtcgccattctcgctgatcgttcattagagatgatcgtatccattatagccgtttggaaggcagggggcgcttatgtgcccctggatcctgaatatccaaaagagcggcttcaatatttgcttcatgatgcggatgcagacgttctccttgttcagcgtcatttaaaaaacagtctcacctttgacggcccggtgattgatttgaatgatgaaacatcataccatgccgatagctcattgttatcaccagcaacgggacacagccatttagcctatgtcatttatacgtcgggtacaacaggaaagccgaaaggagtcatggttgaacacggcggcattgtgaattcgctccaatggaagaaggcgttttttaagcattctccggcggatcgcgtgcttgtcttgtacccgtatgtttttgatgcgttcattttaaatttcttcggcccgctcatctcgggggcaactttgcacctattgcctaatgaagagaataaagaaactttcgccattcaaaatgccataaaacaagagagaattactcatttctcaacttctccccgtcttctgaaaacgatgatcgaacagatgaacacagaggacttcatccatgttcagcatgttgttgtaggcggtgagcagctggaaacagatacagttgagaagctgcattctctgcagcctcgcattcggatcaataatgaatacggaccgacagaaaacagcgtggtatctacatttcaccctgttcagtccgctgatgaacagatcacaatcggcagcccggtggccaaccatcaagcttatattttaggagcgcaccatcaaatccagccgatcggcgtaccgggagagctgtatgtcggaggagcgggagtggcccgcggctacctcaatcgtcctgaattgacggaggaaaaatttgtggagcatctgcatgtccctggtcaaaagatgtataaaacgggtgatctcgccagatggctgccggatggaagaatcgaatatttagggcggattgatcatcaagtgaaaattcgcggctaccggattgagatcggcgaggtagaggcagccatgttcaatctggaaaacgttcgtgaagccgcagtcgtcgcgcgggaagacgcagacggggccaaacaattgtatgcctattatgtcggcgggccttctttgaccgctgcgcagttcagaaaagaattatcccgggaactgccgaattatatgattccctcccgctttatcccattggaacgcattccgctcacttccaatgggaagattgatctgaaagctttgcctgctgctgacgaaaatacgcgggcggaatacgaatacatagccccgcggaacacaatagaagaactgctggcgtctatctggcaagaagtattaggggcagaacgtataggaattctggataatttctttgattttggcggagattcgattaagtcaattcaggtgtcatccagattgtatcaagccggatacaaggttgatatgaagcatttgtttaaacacccctcgattgctgaacttagtcagtttgtagcgccggtcagcagggtggctgatcaaggagaagtgaatggcggaaccaagctgaccccgattcagcattggttttttgaacaaaacatgccgcatgcacaccattacaatcaggccgtcatgttatattcggcggaaagctttaaagaggctccgcttcgccggacgatggaacagatcgcgtcgcatcacgatgccttgaggatgatttttgaaaaaacgccggatggatacgctccgcgaattacaggaacagatgaaagtgaactataccatctggaagtgatgaattataaaggggaaaccgatccggctcaagcgattgccgataaagcgaatgagattcaaagcagcatggtattagacaaagggccattgatgaagctcggtttgttccaatgtccggacggagatcatttgctgattgcaattcatcatttgctgattgacggagtatcctggcgtattttgctcgaagattttgcaagcggttatgagcaggcagaacgcggacaaacgatccagctcccgcaaaaaacagattcgtttccattctgggccgatcaattgtccaaatatgcggcggaaaccgacatgaaagaggagattgcttattggactgagctttcaagcataaagcctcagccattgcctaaggacactatcagcgaaggatcgttattaagtgacagcgaagaagtgacgattcaatggacaaaagaggaaacggagcaattattaaaacaagcgaaccgcgcctacaacacggatatcaacgatctgctgctgacttcgttagggctggctgttcacaagtggacaggcacggaagacattgtcgtgaatttggaaggccacgggagagaaccgattattccggatgctgacatttcccgcacgataggatggttcacaagccagtaccctgtcgtcctgaggatggaagccggaaaagacctgtcgcagcggatcaagatcgtaaaagaagggctgcgccgcatccctgataaaggaatgaattacagcatcatcaaatatatatccgggcatccggaagccgacagcatgcagctgaatccggagatatcgtttaactatttgggacaatttgaccaagacctgaagcatcaggctttgcgcatatcgccatattccacagggttatcgatgaacgaaaaccaagagagaacggccgtgcttgatttgaacggcatgattgccgaagggacattatcactgacactgagctacagcagcaaacaatacgaaagatctactatggcgcaatttgcccaagggttgaaagaaagtctgcaagaagtcattgcgcattgcgtaagccggcagcagacttctctcacaccaagtgacatcctgttaaaagatatctcaatcgacgaactggaacagcttttggagcagacgcgtgaattaggcgaagcggaaaatatttatccattaacgccgatgcagaagggcatgctgtttcacagcttatttgatccgaattcaggtgcttattttcagcaaacgatgtttgatctgcatggagatctggagattgattcattttcaaaaagcttggacggcttatcgcaaaaatatgatattttccgcacgaatttttacagaggctggaaggatcagccgctccaaattatattcaaaacgaaaaaaatcggttttcaattcaatgacatacgagagatgaaggaatcacaaaaagaagcgatgattcagcagtatgccagagaagataagatgcgggggttcgacttagaaaaaggcgcgttaatgcggctattcatccttcgtacggatgaaaagacataccgttttatctggagcttccaccatattttgatggacggctggtgcctgccgctgattacaaaagaaatattcgagaattactttgccttgcttcagcaaaagcagcctgaacaatcatcaattactccgtacagtcaatatattgaatggctcggccggcaagatgcgaaaaaggccacggcttattgggatcaatacttggagggatatgaggagcaaaccggccttcctaaggatcaccatgcagcggaagacggacgatacgttcctgaaaaagtgacgtgtgacataagctccgatctcacttcgaaaatgaagcggacggcaggccagcatcatgtcacgctgaacacgctgctgcagacggcatgggcggttttgctgcagaaatataaccgcagccgggacgttgtgtttggaagtgttgtatccggaagacctgctggaattccaaacgtggaaaccatgatcggcttattcattaacaccattcccgtccggttccggtgtgaagccggaacaacgtttgccgagcttatgaaagaggcgcaagaaagggctgtagcgtctcaacaatttgagacgcacccgctgtacgatattcaagcgcgcacaacgcaaaaacaagatttaattacacatttaatgatattcgaaaattatccggttgatcagtatatggaaagtataggccgccagaacggaacatccatcacgatctccaacgtgcaaatggaagaacagaccaactacgattttaatttgaccgttataccgggcgacgagatgaccatctcttttgaatacaatgcaaatgtgtatgatcgggcaagcatagagcgggttcgggaacatttcatgcaaatcctgcaacaagtcgtgacaaatgcggatatccgggtggatcaagcggaattgttaacggaaggcgaaagaagaacccttctgcagacgcttaacgacacggccgcgccgtttccgcagacgccggttcatcaattatttgaagagcaatcgcagcgtacgcccgatcaagcagccgtcattgataaggacaggcagctcacgtacggagagctcaataagcgggccaaccgactcgcgcgaacgttaagagcgaaaggagtccagacggatcagcctgtagccatcatcacgagaaacagcatcgaatcggtggtcggaatccttgccgttttaaaatcagggggagcctatgtccctatagatccggaatatccgcaagaccgcatacggtatatgctggatgactcccaagccggaatcgttttaatgcagcgggacgtcaggaaacagcttgcctatgaaggcgtcacggttttacttgatgatgaaagttcttatcaccaagatggctctgaccttgctcagataaatgatgtgagccatttggcatatgtcatttatacgtcaggttccacaggccggccgaaaggcgtactaatcgagcaccaaggcttgaccaattatatttggtgggcgaaagaggtttatgtaaaaggcgagaaagccaacttcccattgtattcgtcaatttcttttgatctgacggtgacttctattttcacgccgcttgtcacaggaaatgcaatcatcgtctatgacggagaagataaaacagctctgcttgaatcgattgtgcgagacccgagggtggatatcattaaattgactccggcccatttgcaggttttgaaagaaatgaacattgccgatcaaacggctgtccgaagaatgattgtgggcggggaaaacttaagcacccggttagcccgcagcattcatgaacagttcgaaggccgggttgaaatatgcaatgagtacggaccgacggaaaccgttgtcggctgcatgatttaccgttatgatgccgtaaaggacagacgggaatcggtaccgatcggaaccgctgcggcaaacacgagcatttacgttcttgatgagaatatgaaacccgcgccgatcggagtgccgggagaaatctatatcagcggcgccggtgtggcaagaggatatttgaaccgtcccgaattaacggcagagaaatttgtcgatgacccgtttgaacccggagcgaagatgtataagaccggagatttggcgaagtggctggcggacggaaacattgaatatgcgggcagaatagatgaacaagtgaaaatcagaggttatcgtatcgaattaggcgagatcgaggcggcactgcttcaagaagaagcgatcaaggaagctgtcgttacagccagagaggatgtccacgggtttaaacaattgtgtgcatattacgtaagcggcgggcaaacaacggctgcccggctccggaaacaattgtctcatacccttgcaagttatatggttccggcttattttatcgagcttgatgaaatgcctttaacttctaacggaaaaataaacaaaaaagggctgccggctccggatttcgagctgcaggacagagcagagtataaagctccccgaacaaaagcggaagaaatattagtttctgcctgggaatcggtattaggcgctgaaaacgtcagtattcttgataatttctttgaccttggcggagattccattaaatccattcaagtatcctccagattaaatcagcaaggatacaaaatggaaatcaaagacttgtttcaatatgcaacaattgcagaattgagtccgcatatcaagcagaatctgcgtatagccgatcaaggtgaggtcaaaggaaaagtcagcctgactcctattcagcattggtttttcgaacaaataacgacagatcagcattattataatcaagccgtcatgctgcatgcgccggaaggttttcaggaaacgcagcttcgtcaaaccctgcaaaaacttgctgaacatcacgatgcgctccgcatgacgttccggactacggaaaatggctgcgaggcacagaatgaagaaatcgcccaaagcggactgtaccgcttagaagtcctgaatctgaaagaagattccgatccgggacggacaattgaagccaaagctgatgagatacaaagcagtatgcgtttaagtgatgggccgttaatgaaagccgggttgtttcaatgcgcaaatggagatcatctgctcatcgccatccatcatttgattatagacgggatttcatggcgcattttactggaagatatcgttagcggctacaagcaagccgagaatgggcgagtgattcaactgccgcaaaaaacagactctttccaattatgggctaagagactttcagaatatgcgaaaagtgaaaccataaaacaggaacaggaatattggacaaagatcgaacaaaccgaagtcaaaccgctgcctaaagattttcatgaaacccatacaactgcaaaagacagtgaaacagcaactgtggaatggacgaaagaggaaacggagctgctattaaaacaagcgaatcgcgcttataacacggagataaacgatttgcttttaacttctctcggtctttccatatcgcattggtcaggactgaaacaaattccgattcatttagagggacacggccgagaacagattatacaagatatagatatctcccgcacggtcggatggtttacaagtctgtatccggttgtgctgcacgcgcagccgggcaaagagatctctgattatatcaagacgaccaaagaaggattgcgccaaattccgcataaagggatcggatatggaatagcaaggtacttaagcggcggaatgccatcgaaactcaatcctgagatcagctttaactacctgggacagtttgaccaagatttacagcagcatggggttcaattatcttcttattcttgcggttcagactctagcggaaatcaagaaagaccgtatgtattgaatataaacggaatgatcaccgacggccggctgaagcttacgatcagctacagcagcaaacagtacgcaaaagaaacgatcatgcggttatcggaaacgattcaaagccgcctgcggacaatcattacgcattgcgtccatagagaacaatcggaactgacgccaagcgatattttgttaaaaggcatgtccattgacgaattggatcagctcctcattcaactgccgcatgcaggtgaggttgaaaacgtgtatccgctcactccgatgcagaaaggaatgctcttccacagcctgctggacgaggcctcaagttcttattttgaacaagcatcgttcgatttgcagggagaattaaagattgattggtttaaagcaagccttgaacgattatttgaaacatacgccgtgctcagaacccgtttttacagcggctggaacgatactcctttacaaattgtctataaaacgcaaacaccgcaaattcattttgcagatttgcgtgatatagaggagcacctgagagaggatgcaatcgcagcctatcaaagagaagataaggcaaaaggatttgacttggctcgggatccgctgatgcgcatagcgattttccgtatggaagaccgcaaatatcatttgatttggagcttccatcatattgtgatggatggctggtgcctgtctcttatcacgaaggaagtgtttgatcattatcgcgccttacaagaaggcagggaaccagaaccgtcatcggcagctccttacagcaactatatcgagtggcttgaccgccaagatcagggagcggcaaagcggtactggagcgggtatctcgaaggatataaaggtgaaaccacgcttcttcataaaatagagcagcatgaacaaaaagaatacgcctatgccaatgtgacctgccgatttgatcacgaacagacaaaacaattacagcagatcgcaaatcagcatcaggttacattaaatacgttgatccaaacgttatggggagttttattacagaaatacagcgggtccgcagacgttgtcttcggcagtgtcgtgtcgggaagaccggcggaaattcctgatgtggaacagatgatcggcctgttcatcaataccattccggttcgcatccgctgcgatgaggacagcacttttgctgatacggtgcaaatggttcaacaaaacgctctggcttcccaatcatacgatacctatcctttatacgaaattcaggcccaaacggaacaaaagcagaacctgattgaccatatcatgatttttgaaaactatccgatcggtcagcaggtcgaagagacgggacatcatagtacggagctgaacattacgaattttcatatgctggaacactcccactatgatttgaatgtagttgtcatacctggcaaacagctggccgttcatttcggttttaatgaaaacgaatatgaaaaatcagaagtggagcggatctgcggacattttgaacagctcatgcagcaagtattacagcagccgtctgtcaaaatagaagaattggagcttctctctaggcaagaaaaagaacatttgctcagccgctttcagtctaatgacatgcattacccgcttgaacaaacgatacatgagctgtttgaggaacaggcgcatcgtactccggacaatacagcggttgtattcgagggtaaacaactcacctacggagaactgaaccggcgtgccaatcagcttgcgcgaaccttgcaggcaaaaggtgtgcggaacgataagcttgtcggtattatgactgaacgctcgcttgagatgattgtaggcatcttgggagttttaaaagcgggcggcgcatatttgccgatagatcctgattctccgtctgaacgcatcagttatattttaaatgattcaagcatcagcgtattgctttaccgcgggaagctgcaggatgacatcggcttctcaggaacatgtatcgatctcatggaggaacatttctatcaccaaaaagacagcagtcttgcactctcttatcagtccagtcaactggcctatgccatttatacttccggtacgacaggcaatcctaaaggcacgttaattgaacatcgccaggtcattcacctgattgaaggacttcgacgccaaatttactctgcctacgatgcggagctgaatgtagccatgctcgctccatattatttcgatgcttctgttcagcaaatgtatgcttccttgctgtcaggacataccttgtttattgttccgaaagagattgtgtcagacggtgctgccttatgccgttattatcggcagcattcgattgacatcaccgacggaacacctgcccacttaaagcttttgatagctgcaggtgatttgcagggagttccgcttcagcatcttttaatcggaggagaggcactttccaaaacgacggtaaataagctcatgcaattattcggcgatcatggcgcttcacctgggattaccaatgtatatgggcctacggagacttgcgtagacgcgtctctgttcaacattgaatgttcttccaatgcgtgggcacgcagccaaaactatgtccctataggcaagccgttaggcagaaaccgcatgtacattcttgattcaaaaaaacggctgcagccggcgggcgtccaaggcgagctgtatattgcaggggacggcgtcgggcggggttacttgaacctgccggaactgacggacgaaaaatttgttgccgatccgtttgtaccggaggaccgaatgtacagaaccggtgatctggcccgccttctgccggatggaaatattgaatatatcggccggattgatcatcaggtgaaaattcaaggttttcggattgaactcggtgaaatcgaatcggtgatgctgaacgttcctgatattcaagaagccgccgcagctgcccttaaagatgcagatgatgaatattacttgtgcggatactttgctgcggataagacaatacagatcagtgaacttcgcgaaagaatggcccggcatttaccgggatatatgatcccggctcaatttgtgcagctggataagatgccgctgacgccaaacgggaagttgaatcgccagttattgccggctccggtcaaaaagcgtgacggcggcatagagtacgtcccgccgcaaacttcggaagaaatccagctgacagcaatttgggaagatgtcctcgggttagagcaggtggggatcagagatcacttttttgagatcggcggacactccctgcgggcaacggcgctgattgcaaaaatacaaaagcaattgcatgtccaaattcctttgcgggacgtcttccgtctcccaaccattgaacagctcgcacagacgatcacgaagacggagctgaccggatatgctgcgattcctgcaattgaaaaaagaccttattatccggtatcctcagcacaaaaacggttgtacatcctgaatcacttggaaggcggagaactcagttacaacatgctgggactgatggctgtcgaaggcaagcttgaccgtgacaagctgcagcaagccttccgcacgctgattttgcgccatgaatctttgcgcaccggttttaaaatggctgacggagaacccgttcagtatgtcttagatcacgcaaagttcgaagcagagtggtatcaggcagaagaaaatgatgcggacctttatatccgcaaatttattcgtccatttcatctggatgagccgccgctgcttcgcgtggggctgattgaacttcaacctgaccgcggaattctgatgtttgatatgcaccatattatttctgacggaacatccatgagtgtattgattaaagaatttatccgcatttatgaaggagaaacattaccgcctttgcgcatccagtataaggactacgcagtatggcagaccggcgaagcgcggttaaaacagatccaaaatcaagaagcctattggttagagctgtacagcggcgacgttcctgtccttcatctgccgaccgattatatccggccgtcggcacgggattttgcgggagccacaatgcagtttacgcttgataagcaaaaaagcgccgggttaaagcagctggcatcccaaactgaatcgactttatatatggtgctccttgcgtcttatacattattgctttcaaaatacagcggccaggaagacataattgtcggcagtcctatagcgggaagaccgcacgccgatttggaaccgattatcggaatgtttgtgaatacattggccatgagaaattaccctgaaaaagggaagacgttctctcagtatctgtccgaggtgaaggagaatgcattaaaagcttatgagcatcaagattatccgttcgaagcgctgatcgatcaactgaatatcgcaagagacttaagccgtaatccattgtttgacaccatgtttgtgcttcaaaacacggagcaggaacagttagagataaatgacgtcactttcaaaccatatccaagcgaacatacgatggctaaatttgatttaaccttaacggctgtggaagaagagtcgggtattcagttcacaatggaatacttgacggctctgtttaaaccggaaacgatcgaacgcatgatggggcattttgtgcagctgattgattcgattattaaacagcctgatgccgagctggctcgtctgaatatgatgaccaaggaagaggaaggagacattcagcaactctttaacgatactgcagttgcggaaaaacgaattccgacaacgattcatcagctttttgagcagcaggctgagcttaacccggatcatgaagccgtcatgtttggaattcagacactgacttatcgtcagctgaatgagcgttccaatcagctggcgcgcatccttcaagataagggggcctgcactgatcaggttgttgccgttctcacggatcgctcagcacatatgatcatcggcattttagccatattaaaggccggcgcagcatttcttcctattgatccggagcttcccgaaaaacggcgggcttttatgctgaaagacagcggcgccggtgtgcttttgacttgtgcaggccacgctattccgccgcgctttgaaggagaagtgcttcagcttgatgatccgatgatatatcaaggcagagcagacaatcttaatctttcctgctcggaaaatgatttaatgtatgttatttacacgtcaggcacaacggggcagccgaaaggagttcagctggagcacaagacgatgacgaatctgctcgcttatgagcaggatcatacgcagcttcgctttgacagagtgctgcaatttgccgcgatgagctttgatgtctgctatcaagaaatgttctccgcgctttcaagcggaggaacactctttatcatcggcaatgaggcaaaacgtgacatacgtcagctcaatgattttgtcagaacgcacgggatacaaacagcattcctcccgacagcgttccttaagctccttgcctcagagaaacaatatttcgaaccgtttgccgcgtgcgtggatcacatcatcgctgcgggagaacagctcatcgtaacaagtatgctgcgtgacatgctggcacgccatcaagtcacattgcataatcattatggcccgtcggagacgcatgttgtgaccatgtataccgtcgatcctgatacagatcaggagcttcagccgatcggcaaaccgatttcaaatacggagattttcattttgaatgaagccggaacgcttcagcctgtcggaatcgtcggtgaactttgtatttcaggagcgagccttgccagaggctatcataacagggagcctttgacactcgaaacttttgttccgcacccatatgactcgaatcagcggatgtataaaacaggcgatctggcccgttaccttcctgacggaaacattgaatatgcgggaaggagagaccaccaggtcaaaatccgcggttaccggattgaactcggtgaggtggaggccgctcttctcaagcacgtacaggaagcagttgtcctatcaaaagaaaataccgatggccaaatcgatttatatgcctattttacagcggagcaatcactctcgatcagtcagctgaaagaaaaacttgctggccaaataccgggatacatgatcccttcatacttcatccagcttgagaaactgccgctaaccggcaatggaaaagtaaatcgaagagcattaccgatgcctgaagcaggtttacaaacgggaaccgactacgttgctccgcggacgaatatggaagagcagctgatatgcatctggcaagacgttttgaaggtaaaagaaataggtgtaaaagataactttttcgatttgggcggccactcgttgcgggggatgacgctcatcgccaaaattcataagcaattcagcaaaaacatttcattaagagaggtctttcaatgtccgacagttgaggaaatggcaaaggcaattgcaggagctgaaaccaacgggccggattacattccgaaagccaaagcaaaagatgtctatcctgtatcttccgtgcagaagatggtttacctgtcaacacaaatagaaggcggagaactgagctacaatatgccgggaatccttacattagaaggaaaactcgacataaatcgcttgcaaaccgctttccaaagactgatccagcgtcatgaatcactgcgtaccggttttgagctggtccgcggagaaccggtgcaggtgatcaaaccgcaagcggagttttcgatggaaagatacaaggcaacagctgacgaggttgaggaatgtttccgcaccttcgtgcggccgttcgatctcagccaggctccattactcagggccggactcatcgagttagaacaagacctgcatattttcatgtttgacatgcaccacatcatcacggacggcgcctccatgaatatttttgtcgaagaactgattcaattgtatgacggcaaagagttagctccgctccgtattcagtacaaagactttacggaatggaaacatcaaaaagagcaaagagaacgaatcaagaagcaggaagggtattggcttggtgtatttcatgaagagctgccttcatttgagctgccgaaagattttgcgagaccgccggttagaagctttgatgggaaaaggcacaattttacgctcgataagactgtcacccaagggataaagcagctggaagaattgaccgggacgacagcttacatgattttgttctcggcctattccatactgctggctaaatacagcggtcagggtgatatcgtcgtcggcacacctattgcggggagaccgcatgcggatttggaacccattatcggaatgtttgtcaatacattagccatccgcaccgctccgatggcggaaaagacatttttggattatataacggaaacgaaagaaaccatgctgaaggcttttgaacatcaagagtatccttttgaagaattagttgaaaaactgggtgtaaaacgggacttaagccgcaatccattgtttgatacgatgtttgtcctgcaaaatacggaacaaacggatattgaagtggactctctcgcagtcaggccttatgaacaaacagagacggcagccaagtttgatttacagctgaacttcttaatagatcaagatgagattcagggcagttttgattactgtacaaaactgtttaaaaagaaaaccattgctgtattggccaaggattacgtcatgatcctttcggcgattatgagaaacccatccattcctttaaaagacattcaattaagcgaaaaagtaaacaaaagtaaacatctcgcaagcacaatcgaattggatttctaatcacgggggcagcggctgtcccggcatgaatgccgcggctgccgccagctgcctgaaaacaggaatgaaaccaactggagggatatgaatgtcagaattcaaacaacaggagttgttctggggccgaatgtttcacacggaagaccgtcccggtgcattcccttcgtttcaagtgtccgactcaacagtaaagcgtgatataacaagcggatctgactgtattcacagttcattgagtgcggaggtatcacggcgcatcctgaccatgacgaaccaaacgccaatggccgtctatctggttctcctggtcggaattgaatcccttttatacaaatacacgggggatgagggagtgattacaggggttccagcctttgaagacgaaactgatgaagatcttcgttcagaccagctcatgttaatcaaacagcagatcaattccggcagtacgtttaaatcaattttccatgaattgaaacatacgctggacgaagcgatcttatatcaggacgttccctttgataaaatggccggacagctgaggctgaactacaatgcaaatcatttgccgatcatccatacagttgtttcactagagcaaattcattctgatggtttcatagaaacggctgctgcagatgctttatttcagtttgctatgggtgaagacttgattgacctaaaattatgttttaatgaacaagtctatgaccgtcagtatatgatgcaggtgctcggacatttaaaccggctattttctgtcatattatttcagcctgacctccccctcggccaagtggatattttgccagaatcggagacacatacacttctcgttgacattcaaactgcgaaaactgaatatccgcgggataagacggtttatcagttattcgaagaacagatgaaacgaacaccggatcaagcagccgttatttacggagaaaagcaattcacatatcgtcagctcaatgaacgtgccaatcaattagcccgaacgttaaggaaaaagggggtaaagacggaccggctcactgcgattatttgcgagcatgagatcgaactggtcgtgggaatattggccgttttaaaagcgggaggggcctatgtgccaattgatccggattatccgaagcatcgcatacagtatatagcagaagactcccaagctgatatcatcctgacgcagagccatcttcaaaaacagttggaacttgcgggcacaatggttttcctcgatcaggaaagctcttaccacgaagacggctctgacctggaaccgatcagcagtacgaaggatttggcttatgtcatttatacgtcaggctccacaggcaagcctaaaggagtggcaattgagcatcagggcttaaccaattatatttggtgggcccgccgggtctatgtcaaaggggaaaaaaccaactttcccctatattcgtccatcgcttttgatctgacgataacgtctgttttcactccgctaattacaggaaattccattattgtctacggaggagaaaacagtgctgccttgcttgattgcattattcaggattcaaggacggatattatcaagctgaccccggcgcacttgcagttattgaaagagatgaatatccctgctgagtgcaccattcggaaattcattgtcggcggtgacaatttaagcacgcggctcgcccgtagcatcagcggaaaattcggcggaaaaatcgaaatttttaacgaatacgggcctacagagacagtcgtcggctgtatgatttattcctttgatccgcaaaacgacagacgggaatcagtgccgatcggaaccgccgcggacaacatgaacattttcgtgctggataagagcatgaagccggtgccggccggcgttccgggagaaatctatatcagcggggacggcatcgccagaggatacttgaacagagcggaattaacagcagaaagatttttgcagcacccctttgtgccagaggtgaaaatgtaccggacgggagatttagcaaggcggctcccggatggaaatattgaatatttaggccggatcgaccaccaggtgaaaatccgcggttaccgcattgaaatcggggaagtcgaatccgcatttttccaaataccgccgattcaagaagctctcgttacggcacaagaaaccaacggggaaacatccttgtgcgcctattataccgcacagcattctttaaccgcaggcgaaattcgggagcgcctgtcccggcaacttccgtcctatatgatccctgcttattttgtacagctggcagcgatgccgcttacttccaacggaaaaatagatcgtcaggctctgcctgctccaacgggaaatctcactggaaatccttatacagctccgcggacagaactggaaaaaatactggccggggtgtgggaatcggtattaggcgcagaacaggtcggaatcgatgatcatttctttgagctgggaggagattcgattaagtcgattcaggtgacctcaagcttatatcaagccgggtataagcttgacatcaaacacttgttcaaacacccgacgatctccgggcttgctccttttattgagcccattacccgaatcgcagaacaaggggagatcaaaggccgtaccttattgacgccgattcagcattggtttttcgcccggcaataccctgatccgcatcattataatcaatctgtcatgctttattttaaagggggtttggacgaatcgaagcttcagaaagtcatgaagaagattgccgagcatcacgatgctttgcgcatggtctatgttcagggagatcatgaatacgaagccagaacccgcgggatcagtgaaggagaattattcagcctcgacgtgttctctttactcgaagaaaacaaccctgccgaaacgatagaaacgatagcaaatgacattcagcaatccatccatttagccgatggaccgctcatgaaactgggattgtttcaatgtcaggatggcgatcatttgctgattgcgattcatcatctggttgtagatggcgtatcgtggaggattttacttgaggatataacgtcagcttatgagcagctccaaaacggagaagcgctcacgctccctaagaagacggattcctatctgttatgggctgaacgattgaaacgttatgcagaaagtccggaatttgaagcagaaaatcaatattggcttgagcagaaacatatctcgcaacacaaattgccaaaggataatgagcaggagaccggtctggccgaagaccgggaaacgatcatcgtccaatggacagaggaagaaaccgagcatttattaaaaaaatcgaacagggcctatacgactgacattaatgatttattgctgaccggactcggaatggctgttcatcgctggacggggcatgaagaaattcatgttcatctggaaggacacggcagggaatctatttttcaagacgttgatatttcacgtacagtgggctggttcacaacccaatacccggtttctcttcaaatccaggcagaccgggacatctcccagcggattaggacggtgaaagaacagctgcgtcagattccccaaaaaggaataggatatggcctgatgaaatattcgtccgatcatccgaaggcatcagaatggaccggacatccggaaatcagcttcaattacctcggacaatttgatcaagatctcgaaaatggaggaatcgaagtatctccttactccggagggaaaattgcaagcgacagacatcccattgcctatacgcttgacattaacggcatgatctcagacggccggctgtcattggccatcagttacagcggtaaacaatatcgaagagaaacgatggaaacatgtgcagctctcttaaagaacagcctaaaagaagtcatcgaacattgcgcagctcaagaagacattcacctgacgccaagcgatatctcactgaaggacataacaatcgaggaattagatcaatttgttcagcaaacacaacatatcggcgagattgaaaatatatatccattaactcccatgcagaaaggtatgctgttccatagtttaatcgattcggcttccagagcttactttgaacaagccgtttttgatctcaaaggcggcttggatatcgaggcatttacaatgagtttgtcgcagctggcggaaagacatgagattctccggactcatttttatacggaatggaaagatcagcctttgcagatcgtattccgaaaaaaaccgatcgaaataactgttgaagatattcgaagcatgaagaataaacaacgaaacgagttcattgccggctttgtacaaaaagataaggcaagaggattcgaccttatccaagatgcattaatgcgcgtatcaatccttcgtacagaggatgaccaagtccgattgatatggagcttccatcatattttaatggatggctggtgtctgcctcttattacgaatgaagtatttgaaacctattatgcgattcttgatagaagaaaagcggagcgggaagtcgtcaccccgtacagccgatatatcgaatggctggaagaccaggatcataagcacgcttcagcctattggcaaaaatatttggacggttatgaaggacaaactgttttactgaaagaacctgtctcaaaccaagccaagggatatcaaaaacaaaggcttgcatgccggctcggaaaacagctgtcagaagaaatcagacagactgcaagcaagcatcacgtcaccgtgaatacgttcattcaaagtgcgtggggactattgctgcaaaggtacaacaacagtcaggatgtcgttttcgggtcggttgtatccggccgcccggcagaaattccgggtatcgagtccatggtcggcttatttatcaacaccattcccgtccgtattaccgctcagcctggaatgactgtggaacaagtgttgaaaatgagccaggagcaggcattggcttctcaagggtatgatacatttccgttatatgaaattcaggctcaaactgaacaaaagcagcagctgatcagtcatatcatggtatttgaaaattatccggtcgagaaacaaatggagcatatgaaaccgaatcgtgacgcactggacattatcaatttccatatggaagagcatacccattacgatttcaatttcattgtcatgcccgcgggagaaatcgacattcattttgtatacaatagcaacgtctatgatcatgcaagtgtcaagcggatggaagagcattttatgcaaatcattaagcagatggtgaacagtcaggcgattcgcgtccaagacttggatatacttacgggggatgaacgttcgctccttatagaggcatttaatgatacggaagcagattatccaaaggaaaagacgcttcataaattgtttgaggaacaagcacagcgtacgcctgatcaaacggctgtcgtatacggggaaagccagctgacataccgggaactgaatgaaagagccaatcaacttgcccggacattgcaatcagaaggcgtgcagccggatcagccggtcgggattatggccgaacgttccttggaaatgatcgtaggactcttcggaatcttaaaagccggcggcgcgtatgtgccgatcgatccgagctatccggaagaacggattcactatatattggaggattcggatacgaagctgttgttagtacagagtcacttgaggaaaagcgtgccttttacgggaaaagtgcttgacctggaagatccgcgattctcttgggaagatggttcaaacttgaaacagactgccggaccgaatcacttagcttatgttatctatacttcgggatcaacaggccgaccgaaaggggttatggtggaacaccgatccgtaatcaaccgtctcgtttggatgcagaaacattacccgctggataagcaggatgtcattctgcaaaaaaccccaatcacctttgatgtatcggtgtgggaattgttctggtggtcgatgactggttctaaagcggtattgcttccaaacggaggagaaaagaaccctgacgtcatcttagatacgattgcgcagaaaaatgtcaccattatgcattttgtgcctgcgatgctgcatgcttttcttgagtccatggagcaaaaatccgacgaggaattaaagagaaagctggcatcattaaaatatgtatttgcaagcggcgaggctttgacgcctgcgcacgttgcggggtttcatcgcttgatcacaccggcgggtgaggctcaaatcatcaatttatacgggccgaccgaagcgacgatcgatgtatcgtattttgaatgcgaagcgggagaaacgcttaactcagttccgataggtaaaccgatttccaacattcaattgtatatcgtacaccccgaatcggaatattttcaaccgctcggtgtggcaggagagctgtgtatcgccggagacgggctcgcacggggctatttgaaccgcccggagctgacggctgagaagtttgcagctcacccatatgaagcagggaagctgatgtaccgtacaggcgacttggcaagatggctgcctgacggcaatatcgagtatttgggaagaattgatcatcaagtgaaaatccgaggctaccggatagaactcggcgagatcgaagcatctttactacaactcgatgctgtcaaagaagcggtcgtcatcgcgattgaaaaagagggctcaaaacagctgtgcgcttacttgtcaggagacgagtcattaaatacggcgcagctgaagcgtcatttgctgaacaatctgcctacgtatatgattccggcttattttgtacaagtagagaatatgccgataaccgctaatggaaaaatcgatcgaaaagcgttgccggctcctgagggaaataggcttaccggaaccgaatacgcagcgccaggaacgttaattgaaaagcagctggccgatatatggaaggatattttagctctgcctgaccccgggattaaagatcacttctttgacgttggcggccattcacttaaagtattgcagctcattcatcaaattaacgccagtatgggaatcaacatgcattatcaagccgtatacgattttcctaccatcgaaacaatggcacgcgccattcaagcggccgttttcgaatccgagacggataacgtattcgtcaagctgaatcaggaagattcaatccctgtgttctgtttcccgcctttaatcgggtatggactcgtttataatgaaatggcgaaaagacttgacggcgtcagcaccatctatgccgctgatttcttagaagagccgtctcatgggaaagagatcgttgaccggtatgcagaaagcatgataagcattcaagaacaagggccttttgttctgcttggttactcttccggatcgaatttggcttttgaggttgccaaagccttagaaaagcgggggcgcaccgtatctgatgtgattatgctggattctaaaatcaccgattcggtaactcatttatcggaagaggaaatccaagagatcgtccatctgaatatggacattattccggactactacagagaaatattaaccattccttcgattaaggataaaatcagaggctatcttgcgtatcacaatgaactgatcaattccggcgccgttaacgccaacatccatcatttgctatgcggcgatgtaaccgatgataggggctggacacaatcaacagcacagcattatcttgagtacaaattaaaaggagatcacgtgacgatctttgaacctcacaatatcgaagaaaatacggatgcaattcgatctattattaaacggattgaagaacggcatcatcacggacttgttcttgaagaacaactgtcaataggatcgtttgctggcgacacgaagtttgacaaaatgtaagtgatcaagtgtaaaacgccgctggcctggcactcagcggcgttttttattaaaaaggcgagagtcatactcctgtgttcgcaaggcttactccagagccgttctccatgactggttgtcatcaaatggtaaaaaaatcatcatacattttaaggaaaaagaaggatgtcaagttattagaaaaaagtgtagcgtatgtttatgggtactagctctattattgagttgcttaactgcggagtctgctttttactgccggtactgcaatttggtctcaaatggtaaaagttccccgaatttaaagaaaaaggaggagtgttaagttatgtgtaaaaaatgttgcgtatgcctatgggtccttgctttattattgagttgcttcactgggaagtctgcgtatgctgccagcactccaattgcaaaacatgttgggaattcaaatccgcttatcgaccatcatctgggcgcggatccgtttgcgctgacctataacggaagagtctatatctatatgtcaagcgatgactatgaatataatagcgacggcacgattaaggataattcatttgccaatttgaataaaatatccgtcatatcttcagcggatatggtgaactggacagatcacggagcgattcccgcagcgggtgccaatggggtgaatggcggccgggggattgccaaatgggcaggagcatcatgggccccgtcagccgcggtgaaaaagatcaacggtaaggataaatttttcctttatttcgcaaacggcggcggaggtatcggggttctcaccgcagacagcccgaccggtccgtggacagatccgatcggaaaaccgctggtgacgccaagtacaccaggaatgtccggtgttgtatggctttttgatccggcagtattcgtagatgatgacggtaccggttacctatatgccggcggaggcgttccgggcggttcaaatccaacgcagggacaatgggccaatcctaaaacagcaagagtcatgaaattagggcctgatatgaccagtgttgccggaagtgcatctacgattgatgcgccttttatgtttgaagattcgggaatgcataagtataacggaaaatattactattcctattgtatcaatttcgggggcgcgcacccggccgataaacctccaggtgagatcggctatatgaccagctcaagtcctatgaattctttttcgtatagagggcactttctgaaaaatccgggagcatttttcggaggcggcggaaacaatcaccatgctgtttttaattttaaaaacgagtggtatgtggtgtatcatactcaaactgtcagctccgctctttacggggccggcaaaggataccgttctccccatataaataagcttgtgcataatccagatggctccctgcaagaggtagcggcaaattttgcaggtgtcaaacagctatccaacttgaatccatataaccgggtagaagcggaaacgtttgcctggaacggacggattttgacagaggcatcctcagcacccggcgggccggtcaataatcaacatgtcacaaacattcataacggagactggattgctgtaggaaatgcagatttcgggtcaggcggtgccaggacgtttaaagcaaatgtagcgtccgctctcggcggaaaaatagaagtgcgactagacagtgcaaacggtaagcttgtcggaaccttgaatgtcccttccacaggcggaacgcaatcctggagagaaatagaaactgcggtaagcggcgcatccggtgttcacaacgtattctttgtatttaccggaactggtacaggaaacttgtttaatgttgattactggcagtttacacaaagataagcaaaggtacgttttctaagtctataaaagataaatgaaggagaggaaaaaatgatgtcgagcgtaaaaaaaccaatttgtgtattattggtatgtttcacaatgctgtccgtcatgctgttaggaccgggagttactgaagtttcagcagcaagtgatgcaacagttaatatatctgcagaaagacaagtgattcgcggttttggaggaatgaatcacccggcttggattggagacttgactgcggctcaacgggagaccgcttttggcaatggacagaatcagttaggtttttcggtcttaagaattcatgtagatgagaatagaaataattggtacaaggaagtggagactgcaaagagtgcgatcaaacacggagcaatcgtttttgcttccccttggaatccgccaaacgatatggttgagactttcaatcataatggtgacacatcagctaagcggctgagatacgataagtacgccgcatacgcacagcatcttaacgatttcgttaatttcatgaagagtaatggtgtgaatctgtatgcgatttctatgcagaacgagcctgattacgctcacgaatggacatggtggacgcctcaagaaatcctgcgtttcatgagagagaatgccggttccattaatgcccgtgtgattgcgccggaatcatttcaatacctgaaaaatatatcggaccccattttgaacgatccgcaggcgcttaggaatatggatatcctcggaacccacctgtacggcactcaggtcagtcagtttccttatcctcttttcaaacaaaaaggagcggggaaggacctttggatgacggaagtatactatccgaacagtgataacaactcggcggatcgatggcctgaggctttaggtgtttcagagcatattcatcattcaatggtagagggagattttcaagcttatgtgtggtggtacatccgcagatcatacggcccgatgaaagaagatgggacgatcagcaaacgcggatacaatatggctcatttctcaaaatttgtgcgccctggctatgtaaggattgatgcaacgaaaaatcctgaaccgaatgtttacgtgtcagcctataaaggagacaataaagtcgtgattgttgccattaataaaaataacacaggggtcaaccaaaacttcgtgttgcagaatgggtctgcttcgcaagtatccagatggatcacgagcagcagcagcaatcttcaacctggaacggatctcaaagtaacggataatcatttttgggcccatctgccggctcaaagcgtgacaacatttgttgtaaagcgttaaaggcatcagcattgcattaagccaattttcttactcggaaaagaaaattggcttattttctgtgggagagaatgttgattttttaacgatacacggacattgggtataataatgacaatgacttcaaggagtgatcaatatatgtcacggcttcacagcaaagtattaatcatagacgatgaaaaagaaattttggaactgatcaaaaccgtattaataagagaaggcattgatcgcgtagtgaccgcttcaactgcccgtgacggattggctcaatttcatcaagaaaatcccgatcttgtgatattggatatcatgctgccagacggtgaaggctatgatatctgcaagcaaataagggacatttcacacattcctattatctttttgtctgcaaagggggaggaaacggataaaattgtaggacttgccatcggcggggacgactacattacaaaacctttcagccctaaagaagtcgcataccgggtcaaagcgcagctgagacgggtctcttacttacagccttctcaaaccggaaccgtgataaaaaaagggccatttgaattaaaccaacaacaagccgagctcaccaaaaatgaagcggctattgagctaacacctaaagaacttatgcttatggcctattttctgcagcatcccaatcgggtgatcagtaaagaaacactctatcaagctgtatggggagaagactttttcggttctgacaacacggtgatggttcatatacgcaggctccgtgagaaaatagaaactgtcccatcaaaaccagactttctcgtcactgtgaaagggttaggctacaaatttgttgtaaaggatgcgtaaggatgaattggcgattaacaggcagatacatggtatctgtcatcatagtgaccatcattacagtcttcattaatttatttatttttatgttttggctcgttttacaggcgaacagccaacatgacgaagaaagtacacctgaaactttcacaagatcattcggacaatatgtcacgttatcgaacaagggtatcacagtaaacaaagagggccaaaaagctttaaaagagcagaatgcatggattcaaatattagatgaaaacggacaggatgtttatcatgatagagaacctaaaggactgaagaaaaaatatacgcctattgaaattgtaaatttacataaatataaggatgaacaattattatcaaccatttacgccggcggaaaaaaagtaaacggcaaggagtacagttactttatagggtttaaaaatccctctctcggaaaatttgtcctctcatatgataccaaggaatttgtgacgaagttcaatacaggaaccatcatattattatcaatagatgcattgatcgcgttactcattggctatctattcagccggcagctcacaaaaccgctcggccgtgtcattcaaggaatccagcggttagctaatggagattatacgatcaaaatgaaatccaaaggcatttataaagatgtgttctataatgtcaatcacttatcggaacaactatctttaagcaaaaaagaaaaagataaattagagcaaatgcgtgaagagtggatcagtcatatttctcatgacattaaaacaccattagcatctattcaaggctatgcagaaatcatcaaagatccgaattatcatctcacagtcgaacagatcagagattacgcccggatcattgagagtaaatcgctctatatgaaagatgtgatggaagatttaaatttaacgacaaggctgaaaaacaacgatgtgatgttaaataaagaacgggtaaaccttgtatcgctgctgcgggaaacgttaattgatattttaaacgattcgagatatgcggataagtccattgagcttcaaacgaacctggaaaaactgatgctgaaccttgatgcgatattgattcggagagcggtcacgaatctcattttaaatgccctcgttcacaatgatcccgatgtgaagatcgttgtacagcttgaacaaaaagaacgaactcatgtgacaattaaggacaacggcaaagggatagaagaagaggagctggaaaaagtgtttgatcgctattacagggggacaaatacaggaacgacgcatgcaggctctggtcttggaatggccatagcaaaggatattatccaaaagcacggaggggacatcaccattcacagcaccgcgggagaagggacaacgatagatatacaattatcataatggctatacaaaaaaaacggttctgctgattaataacagaaccgttttttcctattgttccgaaaacactttgattcctttgacaatgttccaaatgaaaaaatagatcgccacaaggaatgtaacagcataagtcgcaagcaggaaaggcccggcatgtctgatatcattcataccaagtaaacctgaagcgatgatgccaattccaaaaatcaaataaggaatcagatgcgtccacaaagattttttcgcatgttctttcacatcgtcccggcttaagaaatagacgataatcggaaacagaaacggcgcaaaaaatatactgaagtaacataatgaagacaaaattttattttctctcaaaccttttcacctctatgatttattgaagggggaattcttctggctgaatcccacactgaagtacaatcttattgtacaactccaaccttaacccgtattaatccgaaccttacatcaaccttaaattaacaaggacgggcaagggctcgtcttcttacagcaatcataagattcaatgccatattgagactcatcacattacatttagagcgtctacgtcggaaatacatttaatttttcgattcgattgaaaaataacgtgtaaagtcccgattcagtccagttttctttgttctatatgtgtcaggtgtgtcttattcaatagagttagagcaaattgacaggcttttaaacctcccaaaaacaagaaattaggttgatagacaatcatgagaaagatttttacaatgagttcgagctcataagaagtgaagagccaaaataatgcgaaggaggaaaagatcagatatgaaacggtcaatttctatttttattacgtgtttattgattacagtattgacaatgggcggcttgcaggcttcccaggcatctgcagcagggacaaaaacgccagcagccaagaatgggcagcttagcataaaaggaacacagctcgtaaaccgggacggcaaagcggtacaattgaaagggatcagttcacatggattgcaatggtatggcgattttgtcaataaagacagcttaaaatggctgagagacgattggggcataaccgttttccgcgcggcgatgtatacggcagatggcggttatattgataatccgtccgtgaaaaataaagtaaaagaagcggttgaagcggcaaaagaacttgggatatatgtcatcattgactggcatatcttaaatgacggcaacccaaaccaacataaagagaaggcaaaagaattttttaaggaaatgtcaagtctttacggaaacacgccaaacgtcatttatgaaattgcaaacgaaccaaacggtgatgtgaactggaagcgtgatattaaaccgtatgcggaagaagtgatttccgttatccgcaaaaatgatccagacaacatcatcattgtcggaaccggtacatggagccaagatgtgaatgatgcagccgatgatcagctaaaagatgcaaacgtcatgtacgcgcttcatttttatgccggcacacacggccaatctttacgggataaagcaaactatgcactcagtaaaggagcgcctattttcgtgacggaatggggaacaagcgacgcgtctggaaatggcggtgtattccttgaccagtcgcgggaatggctgaattatctcgacagcaagaacatcagctgggtgaactggaatctttctgataagcaggaatcatcctcagcgttaaagccgggagcatctaaaacaggcggctggccgcttacagatttaactgcttcaggaacattcgtaagagaaaacattctcggcaacaaagattcaacgaaagaacgccctgaaacgccagcacaagataaccccgcacaggaaaacggcatttctgtacaatacaaagcaggggatgggggtgtgaacagcaaccaaatccgcccgcagcttcacataaaaaataacggcaatgcgacggttgatttaaaagatgtcactgcccgttactggtataacgcgaaaaacaagggccaaaactttgactgtgactacgcgcagattggatgcggcaatctgacccacaaatttgtgacgctgcataaacctaagcaaggtgcagatacctatctggaactgggttttaaaacaggaacgctgtcaccgggagcaagcacagggaatattcagcttcgtcttcacaatgatgactggagtaattatgcacaaagcgacgattattcctttttccaatcaaatacatttaaaacaacgaaaaaaatcacattatatcatcaaggaaaactgatttggggaacagaacccaattagttaagctttaggcggacatcagcaacgatgtccgcttttatcatcttaaacagcaatacatggaggtttacgtgaagaagtagatatgactgtacatataatgtaatcgtttcacagttttgaaaagcgtttatagcgcaatgtatgtattttacacccgccacttttattacttaagggggaacaagagaatgaaaaggtatgacgcatttccagagccaaccggcggctatactgtcggccgcacacaactggattttgagtacacggcatcagatcatacaaaaagagaactgacggtgtttgtgtactatccgtccgacagcagcgaagggaagactacatcaacgtacatgtttcctgaagtctgcgaaatgcttgatgagcagccgcttctcactgcgcggaagaatgcttactctatagatatcaagacccaatgttacgacggccttgctctctccgggaaggaaaaacgctatccggtgttattctatgtttgcggcgggggcggttctccagaatggggcacagtgatctgtacagacttggcaagcgtgggatatgtggtggtaagcatcggccatcagaatagcacgatgtataagcgtaaagatgggcgcccgtttaatgtatcaaaggattttacgtagaggttttttaatattaccttacaaaaaggggatgctgttagaatatggacccacttatatattctcttcacaatttctagtttacataatatatattctaggaagttatacagagaaatgaattacaagtctcataaaccaagtatactttagttattgagacaaagaagagaaatttataactgcaataaatgtttacagcgctagttttgattcagctgaaaaacctaacgcaaaagcaagcttgaaatgaatttcttgtttggtcattacccgcaatgagatcatttctttaggcaagcatataaaaaatcaggtctgataatactttgccgcatcttccctgcttttttccgcgtaatcataaacaaaaagaacaagattttcagcagggccatctgcccggctgccttcatcataccgctcaatgtaggaatctttgcagccgttttcatttcacgaatcgtgagagacaggcaaagaccgcaagaccgaggccgctcccggtccaaaacgacaaaaaactttctccataagataaacgtgacaatgagaaaaagcaccttgtctttcgtaacgcatcacatcctctaatatgaattgacttccgggtgcattatcttcttcctatctattcatataatgagaaaaagccgcctgataaacagacggctctgcagcttattatttgcttcggttacctgcggaagcatgagtgatccgataatgcacagttaaaaatttcagtccgaacagccacatatgatgaacggccttcaggcttgtttcgctctgggctgaaataagaaatgtctctgccagcggaagatgacacgtcccccatttcgtctggagataaatcccttcatcacccgctccgctttttcgccgtctgcttgtcaaaacaagattctgcttacgcgcataaggctttaaaatgcccgtcatttggccgtacggcagaggaagagagatattcatgtatccttccccttttgacctgtatgctgaatacagcgcagtaaaaacggtttcctgcttttcatttgttctgatccatgcacggacattttttctgccgtctttatcagagtcaactcctataatatcactgtgcatgatataccaatccggattcatggacagatgaatctgtcccgctcttctgctgaacggctcgtacacgcgcgcgaacggacgaaaccaaccgctccacgtcactttcgccatgatgtcataatcaattgtcttttcataaaaggaaataacggccggcgccagcttttcagttgaaaagtcttcagaatgcagttctctcagctgatcctgaaggccggtataatggatgtcatttgctgcatgaatgtcagtcaaaaaatctttgcctatcgttcccttcccgtaaattctgctgaacgttctttcactgttctcatcgaacggtctaggattttctattctccaccccgccaaagccggcaggataacgccaaatgcattgacggccccgtgaatccaaatcatctggctgatcgtgagcgttgcctcctcgcggtagacaccgtacgaatatatcaaagaaaaagcaattgtgatcattaacacagccgaagaactcctgatcaagatcctgcctgttttcgtaacaaacggcgccttaaagacgagatatgcatttacatacagacccgcaagatacagagcgacagcaatcacatcaagtgtctttgaaaatgtaatccccaaggcaattaggaccggcgaaatcaaaataatgactgtgctccaccggtaaagtccgcgtttctcccgtatgatcctgccgagcaatccgttaaagatcggaatgagaaaagcggaatagtgaaagtgcaccgccgtcagcagaacgataagcgggccgaaattcaggacgggaatctcaaggacatatgcgaagaaccagaatccgcccccggccaaataaatgaaacccgccataactgacatctcttctgttctgtgaatatttgttttcatcagccggcggacagcatacagtgccagtccaagcgtataaatgaaccacacaaaggcaaaaaagctgaagcctgtgacaagcgcaagcgccgcacatatagcggcaacaggataactccgtaaccacacattctctaaggtctttgacggccgaaaagcaaagcagaatacagcgggaacgaaaaaaagcacggaaaataaaacaaacgtctcagcagctgatatatgcggagcttcagccgccgcaaatcccaaaaagcaaaccacgcttaccatgagatgacgcttcagcatgtttctccctctgtttcccggaaagtcccccggtaagagaaaagcgtgccgagtatccggtttttcacatgaacctttatgctgaagcaattcatttcctcatcataagcctcataaacggttgaattcccgcacagccatgccggaatcgggattttctttccgcctatcaggagccactgccttccggatgtaataacaagccctccgtctgaagacgcttctaaatgcagttcagacagtaggatgtgaggtttgccgaagtaatcaagaattctgttttcccgctcatcatattccatgaccgcatcaaaaaaacgcgttttgcctttaaagaaaaaggtacgattccattccacgccattttgcctgtttttgttttcgatagtaaaagggatatcgtttcccctctctgagaaaaaacatctgaaaaaaacaccggtctttaaaagcattctgacaagaaaagaacctccctttatttctgacataacgccttctccgcaaaacgtgcgtgatccgtcaaatctgtaccgtttctgcagcatcgggtgcagtgattgataatgagtaatcgttttttcatacattgaatccgtcatttcacttctctctttcgttttgtatgccaggcgctcggcagcttgagcttaagaatcatgccggctatcgtaaggactcctaatgaaatcaagaatccgccgccggaatataacagtgccgttacacaaaagaagactgactgcccggcgtgaatcagccactttctccgcatgggaagcagccataatacccctaaccctgtctccagcgttcccctcacgatctctgcatcggcacagccatcatgaaagccttgaaaaaaccaatacagactgaatacgaggcacatacagacatagacaaatccgaaacggaccgatatcttcggatgtctgttttgttctatccaaagccgcaacgcatcaaagctccatgcggtagcccagcttagcagaggacgaaataaaaaccggtctatccaacttcccggcagaccgcgggccgtttcatattgatattgagtcaaaaatgaggtttgtccgttatcccgctctgtatacttccagtagcccctgccttcttttataagtgacagcggatgatcagaggcaaaagcgagcgaagacactctttctgacaagcgaggccttatgtcacctattgattcgcccgtgccggataccttcagcccaaaaccgattcgtgtttcatatagaaatctctgcggttcatctggcagcctatgaagatatgtaatgtcagaaaaacgcagatcccattctttatgaagatgcgggttttgcgtatattcccaaagcgtttctatatcagatgcaatattgatttcgacatatatcggcttctgtttcatgctccctcctcttcccttcttttgtaaacaattcctatattatcataggaacagatcaagcgggagaacgaaaaggccatcccgttatcggcaggacagcctcagtggctttgatgacttatgaataaggtatcgtgtcttttttatcttcagaaactgtttgaatgataatcggacgcacaaaacggattaccgcagccgaggccaaaacagctaatccgcctgcaagcaaaaacgcccccgagaatgatccgcttttatccgcgataaagccggttaaagcaggcccgataataccggccgtgtttgcaagaaaatgcataaagccgccgactgacccgacattcctttgatcaaccacatcgtgaatcaccgcccaatagatagagcccgttatatataaaaagaagactgataaagcaacgagaataacggcacttacggcagtggtaacaagtccggcaaatccgatcagtacagcggaagcgaacaggcaagtgacaagaatgactttccgtgagaacaaaaccccttttccggcggtttttttgtatacataatcagaaatcattccgcctgccgccaaaccgataaatccaagaatccagggaataacagtcaccacgctcataaattcaatacttaatccgcgttctttcaccagatagctcggaaaccatgttaagaagaaaaataagatgtaattgtaggcgaaaaaggcaaaagccgtgaagagaaccgttttttgttttaaataaaaggtcatcgggatatgctgctcatgcgattgaaccgccgctttcattgccggggtgtcttccgtctgtgccggccgttctttgacaaatttaaaccagataaacgcccagactaaaccgacgatcatgatcaggacaaaggaaaccttccagctgaatgccacagcaatcatcccgacaatcgggccggaaatcgctccgccgagcggcgtgccgctgtttgtcaggccgatgaccgtggcgcgctgagacggaggaaaccaattgttgaccattttgcttatggcagccgacagcggcccctcgcccataccgaataaaacacggataatcaaaagacttacaaatccgaaagcaagcgcaaccgccccgctgaaaagagaccaaacgatcatcgccgtacacaatgtcaatttagccccgtaccggtcagatgcaacaccgccaaggaagttacacacagcgtatccgacagaaaaactgctgaaaatcagccccatttgggttgcagacaatgtgagatcctgctgtatgaacggcgccgcaatagacagcgctgaacggtctaaatagttaatcaccccggctgaaaataaaagaagaagaatagggaatctatcctttgagaacataaaatccctccctcttatttcataatttaaattgccggagtaaaccggtttatgtaatgaaaccggttatccggattgccttgccagaagcgccggtttatagcggtgaatccgtttttcaccgctatctttttcttgtatctggcaaagaagaaggcttcccgcttttcgcgccatttctgccgcaggctggacgatcgtcgtaatcggaggagtaaaaaaacccgcaaaaggaacttcatcaattccgatgacggctgccttatccgggattgtcatatcatgctccttcatatacttcagcacctcaacaagaacgatatcgtttgccgccaatatcgctttcggaggctcctgaagtgagaacagctctgacaaaacattggaaatatcagccgcatcggctgttttgatatattcgttccgcaccatcatcccgtgggggtcaagcgcctttttatacccttcaatccgctctaccctcggactgatttcccgaataatggacgtcgtaataatcgcgattctcttaatgccgctctcgataaaccggtcaacggcaagaccggctgcatgatggttatcaagcatcactgtcggaatcccgagttcttcaatggttctgtccataaacacgaccggaaacgtatcgcgtttcatcttttcatataaggagagattttcgcccgtcggaaaaataataattccgtccacctgcttggccctgagcatttcaatatatttcttttctttttccggttcatcatccgcattgcagacaataatatgaaatccttgttcatgaaaatagtcttccaccgccctgatgacctgagtggaaaaggtgtgaagaatattagccaccaccacacctaccgtaaatgttgatttctgttttaagctgcgggcgacgaaattcggctgatagttcagctcatgaatggccgcttctattttttgtttcgttttctcgctcatatagtcatagcgctgatttaaaaattgagatacggtgcttttagatacgtttgcatatttcgccacatcagaaattgtaatggttttcatagactcatccccgtctgtcttcatttttcactagtataagtcagaagtaaatagtttacaatctgacagggaactggattctgtcacactcccgaataagccataaaacctccgtcgacgggaacggtgaccccggtgataaagcctgagtatgaatcatccgaaagccacaggagcgttcccagaaggtcttccggtttcccgaaacgtttcatcggtgtatgtgccataatcttattggatcggtctgtcagacttccatcttcctgtaataacaactcacggttttgcgcagtcaaaaagaaacccggagcgatggcattcacccgcagcccttttttcgcgaaatgaacagccatccacatcgtaaaattctgaaccgccgccttagccgcactgtaggcaggcacctttgtcatcggtgtatacgcactcatagaagaaatattaataatcgcgggacattccgccttcaaaaggtcttttccaaacacttgcgatgccagaaatgcaccggtaaagttgcttgaaaatacgctggaaaatcccgtttcgtccatatcaaaaaatgatgggctctgctcatcctcttcatacgtctcattggcagtgatcgcatcagcgtggtttcccccggctccgttaattaaaagattgacagagccgaaccggctgataatctcgtcttttgccttttcgagcgaatcacgggctgaaacatcagccggtacagaaaccgcggttcctccagcatcagcaatctcgcccgccgcacgctctgctttatcagcattccggctgacgatcgcaattttcatcccctgccgtgaaagctcctttgccattgctgaacagagaacaccgctcccgcctgttatgacagcggttcttcctgataaacgtccatgaatcggtctcatctcttcacctctttctcatgagacgagaacgcatcccacagtccgctcaagtacataattcctaaggcacgatcatataaaccatagcccggccggcattgttcgccccagatatgacggccgtgatcaggccgtacatatcctttgtagccttggccgtgcaattcttttaccacaccgataatatcaatggacccatcactggtaagatgcgaagtttccgtaaaatcaccgttatcgcagattttcacatttcgtatatgggcaaacggcgcagctcccgcatagtgtttggcgatcttcaccatatcattggcgggatccgctcccatcgaacccgtgcacaacgtaatacagttggcgggtgaatctgaaatctctcgcagcttttcataacttttctcaccggtgataatacggggcaggccaaaaattgaccaaggcggatcatccggatgaatggccatttgaatgccgtgttcctccgctacaggaaggatttcatgtaaaaagaattctagattggcccaaagctgtttttcaccgaccgtttgataggcttcaaacagttccttgatccgggccattttctccggctcccacccgggaagcgtcaaatcagaagattcttcaaccgtgcggatcagttcttctggagggagactttccactttcgctttttcaaaaaacaaagcagttgacccatcctccagtgcgcggaacatatcagtacgcgtccagtcaaaaatcggcatgaaattgtaacagatgactttcacgccgaattcggacagattgcgaatggtctgtttatagtgctcaatatattgtccgcgttcttcatggccgagtttaatggcttcatgaacattcacgctttccacgacctctgcatgaaacccataggattgaatgaatctgacttcggcttcaatgtcctccttttcccatacttcgcccgcgggcttctggtgaagagcccagacgatgcctttgaccccgggaatttgtctgacatgttcaagcgtcaccgtatcattaccttggccgtaccagcgaaacgtgatattcatgttacacccccgtatattcgttttttcggcagacgtattctttgctgagggatacggcagcttcatagccgcccttttgatatgcttttgtcaagtcgcttcccactccgaccgcgaccgctccggcagaaagccagtcattcatgctgtttaatgagatacccccggtcggcataatgcggacattcggcagagggccgttgaccgacttgataaatgagggattaaacgaattagcggggaacagctttaccacatcacatccggcttcgagcgccaaagccatatcagacacgctcatgcatcccggaagatacggtacgctgtactggttgcatagagatgctatctcttttacaaaatgagagctgacgataaatgaggcgcctgataaaatggcgtgtctcgctgtttcggtatccattacagaaccggctccaagaagaatatcttgatgccggagttccttaaagacatcttccacttcaggagttgtgtatgtaagctcaatggcgctgatacctcctgaaatggccgcttttgaaacttcaagcgcctcttggctgttttgtccccttatgacagccaccacttgtgcatgcagaagtttttcgtaaatggcgtacttaggcagcattctcgctcctcctttaatcaaacgtaatgattgcttttcccaccttgcccgggtgctgttcgatcaactgaaatgctcgatggacgtcatctgctgaaaatgtatgtgtaataagaccgccgtgcgttaacaggcctttattcagtaagtctgtaatgtacggaaactgattcgtctgcaatcttgaaccggtgatcgtgacttccttttttgtgatcggaagctgagaaatgccggcagtcctctcatcaaaaccaagcacaaccacatgaccggccggagacactgcgtcaattgacgtttcaaacgttgaggggagacagacggcatcaatgacgacattagcgccttcattttttgtccattcgttcacccgcaaaacgggatcttctttttgcgcgttgacggtaacatccgcaccgtttttttcagcgaaggccaagcgttcatcattcaagtcggttatcatgacggaagcgcctttgaactttgccatttttaatatgcagattccgatcggccccgctccttgaatcaaaacggtatcttccttctcgacacggcctctccaaacggcctgggcgccgatcgtatatggttctgccatgaccgcttcctcccagggtagatcgggcgaaacagcatacagctgcttttccggaagcacgatatattcccgcatcccgccatcttcatgaacgccgaacaccgaaagcgctttgcagacgttcggacgtcctttccggcaggcatagcatgttccgcaataagatatcggttcaatcactacccggtcacccggcttgaaacgccggacatgagaaccggtctttgcgacttcccctgtgacttcatgtccgattactctcggcagggacgctaacggatttgtcccatgataaatatgcaaatctgatccgcaaattccgacccgattcaccttgacaagaacatcatccgcgtggacaacagacggtttctcacattccgtcaccatcagatcaaatgctttccgtacttgaaccgctttcattttttcacccgctttttaagttgtgcttgctaccgttcaatcacagtctctttgtttacaaatgacagaacctcttctaggcagggaagcccttcattgtcaccggaaactgtggtgacgagcgcaccgactgcatttgcaaactccagacgtttttccggttcaaaaccatgtagataactgtacaggtagccggcattaaagccgtcacccgctcctaccgtgtcgacaggcgcaaccgggaaagcctctttgtgaacccacttatgatcatgatacagcgcagaacccgcttcaccgtcttttatgacaagctgactgattgaatagctctctgcaaaccgggctaatgcttcattttctcctatacctgtcagctgtttcatttcgtcccggcccgccagaagaatatcagtatgcggaaagatttgatgaaatgccgcacgtgcctcctcaatcgtccacagcttcagcctgatattcggatcaaaagatacgggaatctttcttgctttggcgatggaaagcaccctttcagcaatttcaagatttttcttaccaagcgcgaggaacacaccggtaagatgaacgatgtgaatgccgtcaaacatattctcagttatatcttccggtgcaagagtcagaattggtgaattgaaacgataataaaacgtcttgcctgaaccgtcatttctgatctctttgacatttaaagatgtaggaaagccttcaacaaaggagacgtcagtcacatcaattccttctcctttggcaaactgataaatcactctgccgaactcatccttccccagtctgctgacccactttgagtgcaggttcaatctggcgcatgcaatcgcaaaattcagttcagctcctcctgcttttcgttcaaaatgggtaacaaaacgcaaaggtcctgtgcttgcgggatttaaggtgatcatcgcatcaccgatcgtaaaaatgccataatcagaagccacatcaatactcctttcctttaagactaaatcggtttggtaaaccggtttagttaaactttatatgaaagcacttacatatacaagagaaaaatacaataaattcaaaaaaatctgtttccagtaaaaataacccggtttttcacataaaaaacccctcacaacaaaatgtaagggggttttttgaaaattgtatgcatgtttcctcagttagcagtcttacgttcagggcttgtaccttcttcttccgcccatgtttcaatatgcttgagctccggagtattctcggctttgaatacgggatcaagaccttttttgcgctgagcggcataatccttatagatcttgtaggctacattactcagcagtaaaattgccactaagttaatgagagccaagagacccataaacaagtttgccatgtcccagacgatctggaagtcagccaaacatccgtataccaccatcactacgacgaatacgcggtaaatattaagccatgttttgcttgttttaataaattcaatattcgtttcaccatagtaatagttgccgacgactgagctgaatgcgaataaaaacatcgcaatcgcaataaatgtcggcgcccatccgccgagatggtgctgcagtgcggcttgcgtcacttggatgccgtcgcctttaggcgtaacgctgtacaataaaatgataaaagcagtcgatgtacaaacgataaacgtatcaaagaacacgccgagggtctgaattaatccctgcttagccggatgcgacacatgtgcagctgctgcggcattcggcgcgcttcccattcccgcttcgtttgaaaacaggccgcgctgcgctccgataataatgatgcttcctaagcttccgccgacgatctgctcaagaccgaacgcatttttcacaatcgtaacaagcagctcaggtaccgccgaaatatttacaatcacgacatacagcgcgatcagaatatacattcccgccataaccggaacgattaattgcgagacggaaacaacacgcttcagaccgccgaatataatgaaagccgttaatacagctaaaatgattgcgataactgttttattcacatggaatgcttcgtcaaacgccacagaaatcgtatttgactgcaccgcgttaaatataagtccgaaagaaacggtaatcaatacggcgaataaaataccgagccagcgggcgcccagtccctttgccatgtaatatgccggaccgccgcggaattcgtcaccggaacgcactttatacagctgtgccaaggtgctttccacaaagctggaagccataccgacaatcgctacgatccacatccaaaatactgcgccgggaccgcctgttgcaatcgccagcgcgacgccggtcaagtttccggttccgacacgagaagctgctgagataaagaatgcctgcattgaagacactcctttatttccttgcggcttctccccgacgattctgaacatttcaaaaaagtactggaattgaataaagcgaaaacggaacgtaaagtacaatccgatcccgactaaaatataaacaagatacttccaaataaaatcatttggaacatttatgatttcactgatgaaagcctccatgtttaacctcccttttacatatcttttactgtcatttttgctgtatatgttagatcttttaacacaacgggtattattatatcacaacaacagtggttgagaagtttttttaagaaaatgtttcggtttcttcatcacatcttttgctgtcatgccccgttttttatcttacagcctgaaaaatgttgtcacgttataaggaatgcgtgcatatcataacaaataggtctttaagaaaaaagagatgaaaagatggatggaatggtatatacttaaccaggataataattttttaaatttaataaatgtgtttactttacatttaaattagggtattataataaaaatattcagacttatgaagggaggagaacatttgaaaaaaatcttgtttttaaaagcttctattttatttttagcgattgcaagctttcatttgctctccattccccatgcgtttgataccgctcatcattttaaagcggtagccgaccagcaggaaatgcacgaaatgaaggccggccaaaatgctgatgatgagaaaaaatcgctgacgggctcatatatcttgacggcgctttttgccgcttctgtctcactgattgtgatatcagacaggagacgccccgcttcccggagaagacagcgaaagaaaagctttttaatcgctaaattttatcagtcctcgtatttcgatgagcttcatgttcaacatcgcctatctatgtaacataaaatgaggaggttgttaaacatgttgtttatcttacgaatggtgattttagggttgttttcattcactgcattgaatttatttgtatggcagggaatcgaagtcattcacgctatcactgacttattcggcagccatgaaagctaaatagtaaaacctccgctcaatgagcggaggttttttattttatttttactcttaaacatcgtatgcagggatacgccatacatctgttaccggccctgtctcatcttcatcggtaaagaaggagccgttgctgtatcggtcattcgcccgcaaggacttcacggcgatttcgattctctcgcctttttctgtttccgcagcgatcatgtcggccaaagcgcacgcaaatacgccgactgcccgatgcgggttcttttttagctcacgcagcatgatgacaccgcgtttcgccctggatgttttttcgaattcagataggttcatccgtttgattgctccccgctgtgtgacgaggacaagcgaatctgtttcatgcaggatttgccctgatacgacggtatcaccgtcttttaaatttatgccctttacgccggccgcacgggcaccgactacatttacttcatcttcaccgaaccataaaccgtacccgaggcgggtggcgataaacagctggctgccgccgtctgtgacatgaacatcaatcagctcatcatcccctttaaggttaagggcaacaagcgctttcgagtaacgctgcgctttgtaatgcgtcatttcagttctcttcaccataccgtttttcgtcatgaacagtaaatatgaagatggatcaaattcttttaccggtatagctttcacgatggtttcatcacggtcaatcgtgatgatgttcgttacgtgctgccccatgtctttccacctgatatcgggaagctggtgaaccggacaataaacatagcttcccttattggtaaagagcagaagaacatccgttgtattcatttcaaattggtgaatcagcctgtcagtatccttcataccgaaatcctggccgttagaagcggcaaatgaccgctggcttgttcgttttacatagccgtcttttgtgactgtcacatatacgtcctcagaggcaaccatgacttcaagattgattttaatttcctctatcttttcttcaatgacagaccgtctgctgtcagcataggtctttttcaattttttcaggctgcttgtaatgacttttaacagctttttatcatgacttaaaatggcttcgagctcctgaattttcttgctgagctcttccgcttcctcttttagcgccgtaatatccgtgtttgtcagacgatacagctgcaaggatacgatcgcttcggcctgcggctccgtaaatgcgaatttagaaattaagttttgtttcgcatctttcttgtcgctgcttgcccggatgaccgctatgacctcatctaacacggacagtgccttcatcagtccttcaacgatgtgatgccgctcttttgctttttgtaattcaaagacggagcggtttgtcaccacttccttctgatgggaaatatacgcatccaggatggccgtaagactcatcagcatcggccggcggttatgtatggcgaccatattaaagttatatgttgtctgcagatcagtgtttttatataagaaattcaggatgccttttgcatcggcttctttctttaactcaacgaccacccgaagccccgtgcggtcagtttcatccctgacttcagaaatgccttcgacttttttgtctatgcggtattcgtccattttcttaacgagattggctttgtttacttcaaacggaatttctgtaatgacgatctgctcccgtccgcctcttacggattccacttcagccttgccgcggataataattttgcctttaccggtttcataagccttccgaatgccgtcgactccttgaataatgcctcctgtcggaaagtcaggccctttaatcacctgcatcaagtcatcgacagtgcaatccggagattcaatccgtttaatgacggcatcaatgacctcacccagatgatgagggggaatatcagtcgcatagcccgctgaaatcccggttgatccgttaacaagcaagttagggaacatggcgggcaaaacaaccggctctttactggtgtcatcaaagttcggaacgaattcaaccgtatttttatcaatatcacgcaaaagctctgacgcgatagaagataatctcgcttccgtataacgcatggcagccggcggatcaccgtcaatgcttccgttattgccgtgcatctcaatcagcacattccgcactttccaatcctggctcatccgcaccatcgcttcataaacggagctgtcaccgtgcggatgataattaccgataacgtttccgaccgtttttgccgctttacggaaatttttatcgaatgtatttccgtctgcgtgcatggcgtataaaattctccgctgcaccggctttaaaccgtcacgagcgtcgggcagcgccctgtcttgaataatgtatttactgtagcgtccgaaacggtcgccgattacttcttctaacggtaaatcatgaaataattctggctgtgccactattaaacctcctcagcgaccgacaagttttcattttccaaaatattgctttcctcatctaatccgaaggcaacattcttttcaatccattttcttctcggttctactttgtctcccattaatgtcgttacacggcgctctacccgtgccgcatcgtcgatcttgactctgacgagcgttcgcgattcgggattcatcgtcgtttcccagagctggtctgcgttcatttctcccagacctttatagcgctggatggtatatcctttgccgactttctttaaaacgccgtccatttcttcgtcggaccaagcatattcaataatctctttcttgccgcttcctttgctcactttgtaaagaggcggaagggcgatgaaaacttttccgtgctcgattaaaggtttcatatagcggtagaaaaacgttaacagcaagacttgaatgtgcgcgccgtcggtatccgcgtccgtcatgatgatgatcttgtcatagttgatgtcctctatatcaaaatctgcgccgacaccgccgccgatcgcatgaataatcgtattgatttcttcatttttgaagatgtctgcaagctttgctttctctgtgttgatgacctttccgcgaaggggcagcacggcttggaatttccggtctcttccctgttttgcagagcctccagcagagtctccctccaccagatacaattcattcttcgccggatttctggaaccggccggtgtgagttttccgctcagcgtcgcttctgattttttgcgctttttgccgcttctcgcttcttctctcgctttacgggccgcttcacgggcctggcttgctttaatcgcttttttgacaagcagggttgccgtatcgcggttttcttccaagaaataagcaagattctcagaaatgacggcatccgcggcggatctcgcctcacttgtgccgagcttccctttcgtctggccttcaaattgcagcagttcctccgggatacggacggaaatgattgcggacaaaccttccctgatatcggcgccttcaaggttcttgtctttctcttttaaaagggcgacctttcgcgcatactcgttaaacgctcttgtcattgccgttttggctcctgattcgtgggtgccgccgtcctttgttctgacgttattaacgaatgacagcatattttctgaatacccgtcattaaactgaaacgcgaaatcgacttcaatgtcatgatgctcgccttcaaaggacaccacttcgcataaagcgtctttttcctcgtttaaataagcgacaaatgcttcaattccgttctcataataaaatacttcttttacgcctttccgttcatcaattaattctattttcaaaccttttaacaagaaagccgattcgcgcagacgttctgacagcgtgtcaaaattataaaccgttgagctgaacattgacggatcaggtttaaaatgggtaagcgttcccgtttttttggtcgttccgattttttcaagtgaagtcacgggcttgccgccgttttcaaaccgctgtttatagacatatccgtcacgctcaatagtaactgtcagccactccgataatgcgtttacgacagatgcgccgacaccatgcagaccgccgcttgttttatagccgccctgtccgaatttccccccggcatgcagcacggtgaaaataacttccggcgtcggctttccgagcttatgcatcccggtcggcattccgcgtcctctatcctgaacggagatgctgttgtccttatgtatcgttacgataatatgatctccgtagccggcaagaacttcatcgacggaattgtcgacgatctcatataccagatggtgcaggccgcgtgcgtccgtcgaaccgatgtacattcccggtcgttttctgacggcttccaggccttcaagcacctgtatggcatcttcgttgtaatcaaattgctgttttctagccaaacgtacaaacccctttcaaaaaacctgctcttaatcattctcttttttaaatgttttcatgtctttgtttttcagtatgcgcaagcttcggtccaattctcctcggactcacaattataaccaatatgcttgatttcgcaacatatttaagcgaatggctcgttttttaggccgcaagacatacattcgaacggcttttcatctttttggtgcccttttcggcagataagaacatgagttcgctttctattatatagctttatgccggccatcgcaaacagactgcaaacccctgtataaaggggtttctaaaaaagctgttcatgctttattgtatctgtttcatcatcatacgcaaagagtattctttcaataaaaaagcaaaaacccctgatttgccaaggatttttgccttttttgttcctattttataacagcgcgggcgacttttatacataaatccattacagccgtccgtcctttgtctgtaatcatgcgatacgcttcttcatttgcaaggccctgctgcgcccaaaaaacgggagcgtccgtctgtaaaaattcttcagcaacgccgggaagctgctcagagcgtctgaacacattcacgatatcaatcggtccctccacgtcttttaatgaagcaacggctttaacgccaagcgcctcatcaatcgttgggttgacgggaataatttcatacccttcatcctgcatcgctttggaaaccatgtaagaagtccggtcgggacgatctgacagcccgacgaccgcgatccgtttgctccggtccagaatttctttaatctctgattttgaaggattttgcatctttaccatctccttttgatatattgtacatgaccgcttcgccggaatcaaaaaaagcgatttgtcagcttaattctcaaaaaacttgtcatcagacggtaacaactcgtgttaaaatagagtgaagggacattgaaaaggagaaatgtagatgttgattgctttattgattattttggcctatgcaataggcagcatcccgtcaggtttagtcgtaggcaaacttgcgaaagggatcgatattagagaacacggaagcggcaatttgggcgctacaaatgcttttcgcacgcttggcgttaaagcgggatctgtcgtcgtcgcagccgatattttaaaaggcaccctggccgcggcgctcccatatttactgcacgtccccattcatcctcttctcgcaggggtggcagcagtgatcggccatgtattccccgtgttcgcaaagtttaagggaggcaaagccgtagccacatcagggggcgtcctgctgttttatgctccgctgttattcgttacgatggttgcagtatttttcgtatttttattccttacgaaatttgtttctctgtcttcaatgttaacagggatttatacgattatttactgtctgtttgtaaaagacccttatttattaatcgtagtgacgctcttgaccgcgtttgttatctacagacacagggcaaacatcaaacggattataaacaaaacagaaccgaagatcaaatggttttgatgaaacttcaattttgacatcaaaatgccatatgcgtttataatagagataatttctttatatgagaaacaaaaagggagtgttccggatgaacatgaaagtaacgaaaggcgcgctggattggtacaaagaagagctcgatctggaaacaggcgaccatgtccgtttctttgtccgttacgggggatgcagcaacgttcagaaaggcttttctctcggcattttaaaagacctgccgatgaacatcggcaccagcacggaagttgaaggcattaccttttttattgaagaaagcgacttatggtactttgataatcacgatttgtcagtcacatattcagatcaggcagaagagccggtatttgattacgtgtaaaaaaaagaacgcagcggatgcgttcttttttttacagcctgaacctttttaggtgatcagtcagacgttctttttctaatatgcttctttgcgtttctccgagcaggtcaaagtggggaaattcatttttatggtgaatccactccggcttcagcccgtactccgctccccatctgatcagtttattgagatcgcttgaaccggccttcgtcacggtcttagcctccggaaagcggtcgtccagccagtaatgcgttaaaaaagcgattttcccttccgatacatcctgcttccatctttccagttccttacgcgtaattccaaatgccataagtgcagccgctccttatttttttgccttttcgtaagcggcatgccaatcaggaaaagccttgcgaaactgaatcggtttgaagctctctttatcaacgcatatatgagaggatgtcgctttgatggcaagttcttgatccggattatagatgtggtagccgtaaacggttttaaatccgttatattcttcaatccaagtatgtacgacagccgtttcaccgtagcggagcggctttttataagaaatgctgatatccaatacaggggacagcactcctctatcttccatatccttgtaaaggaatccgagttccttaatcagcgccgttctgccgacctccatccagactaagtaattggcatgatagacgatgcccatttgatctgtttccgcataacgcacttctatttctttttttgacacatgcaacgttctctgctccctttttatcagattagccccattttatcacaacgagccggaaagagaaaaaaaccaggtttccctggtttttattatgattgatagccgttttctcttgcagccgattcatcctgaatttcactgcggaacgattcaatgctttcattgcgtctggcattcttttcttgaatgcgctgtttttcctcatctgtcgcaaattccattgattctttcgcttcttctatattttcaattgtattctgcaccatatcctgcagcttttcaacgttatcggaacggtcatccggattcggtttttgatcattgtttgtcataatgtctgctctcctttgatgatgttattcgcctttcgtctgcatgacaatcggatgtccgtttgacttgtcatgaaacttttcccctttgttgcgtttatatttaacgggttttgtccctaagtggctcggagcgtattgcggctggccgtctttcttgtttatgcccatgttcatccctccttaagagtatattttgcaaaaggaggtgcaaacatgactgcaaattaaaggttatttttgtttgaaccgctgctccagcttttcttcaagctgattcaaatattccgtattggtcatcagctcacgtttattttccataaccaattcatgaaaagaacgttttcgcatttttttcaatcttctcacctccgtgttttcattcattttttccaatttttcaaaacctaagcccttcacaataaaaaaactgaacctctatttgagatccagtttttctttcatttctttttttgtcatcgtgcctacgcgaatgtgctgaatggttcctttttcgtctaatatgtatgttgtcggataagaaagcacgttgaaatccccgttaattccgcttttgtcaatcagaataggaaaggtcagctgataatgatcagcaaatgatttcacagcctgtatatttttttcagaagacgtaaaattaacggctgctaccgcaatatcaggatattctttctgcagctcctgcatatccggcatttccattcggcacggcttgcaccacgtcgcccagaaattgaggagcactttttttcctttataatcagatagggagatactttttcctgacaatgtatcaagtgtaaagtcaggggctttcatcccttcttctgtcccttctttcggacttttttgcacggaataaatgttccagcccgcatatactaacaacccgataagtaacattccgcccagccatttcgcaagcatcttaagcctcccgcataaaaagagagaaagcagactgctttctctcttttgttcattctgctactgtttcattttatcgcgaagcaccatttgtaaaatgccgccgtggcgatagtaatcaatttccacttcactgtcaaaacggacaacgacttcaaacgtttttaccgtaccgtcttcactgattgctctgacagtcagcaagtcgcgcggacgtacagattcatcaacatccacctcgatgacttccttaccggttaagccgagtgtatccgcgttttcgccctgtttgaactggagcggcagcacacccatgaagacgaggttgcttctgtgaattctttcaaagctttcggcaatgactgttctgatgccgagcaggtttgttccttttgcagcccagtcacgtgaagagcccattccgtaatcttttccggccaggacgacaagacccgttttatcttctttataccgcatgcaggcatcataaatagatgtcacttccccggtaggccaatgtgttgtgtagccgccttctgtacccggtgcgatttggtttttaatgcggatattggcgaatgttcctctcatcatgacttcatggtttccgcggcgtgagccgtaagagttaaagtcacgaggagaaacgcctttttcctgcaggtatttgcccgccggtgtgtcttttccgatcgctccggccggagaaatatggtcagtcgtcacggaatcgccgaatttgccgacaacgcgaagtcctcttaaaggctcaacttttcccggctctacagacatttcctcaaagaatggcgggttttgaatgtaagtggaatcctggtcccacttatacagcgcttcatccgtcgtttcgatttcgttccagcgctggttgtcgtcaaataccgtttcatactctttgcggaataattccggcgtaacagtctgtttgacgagagaattgatttcatccatggacggccagatgtcatcgaaataaacattttgtccgtcatttccgacgccgatcggatccgttttcaggttgatgtttacagttcccgccaatgcgtatgcgacaacaagcggcggtgacgcaaggtagtttcctttgacaagcgggtggatccggccttcaaagtttctgttacccgacaggacagaagtgatcaggaggtcatttttagcaaccgcttcttcaatctctggagaaagcgggccggagttcccgatacatgtcgtacagccataccccacaaggttaaagccgagctccttcatgtaaggaagcagacctgagttgactaagtatccagtaacaaccttagaccccggtgcaagtgaagtcttcacataattcggcactttcaagcctaattctaccgcttttttggctaccaatccggcaccgattaatacataagggtttgatgtattcgtacagcttgtaatagcggcgattgcaatcgcccctgttttcataaccgcatcttcaccgctgttaagtttaaatgaaatttctttgttctcttcagcagcatccgctccgaatccttggttgccggccgggctgacaagatgttttttaaacgtttcctgcataacggaaagcgggattaaatcctgcggacgtttcgggcctgaaaggttcgcttcgatttttgacagatcaatttccacaacgtctgtaaaaatcggctcttccgcgtcaggcgtatagaataaaccgttgctgcggcagtatgcttccacaatatcgatctgctcttcttcacggccggtcagacgcaggtaagaaagtgcttcctcgtcaaccgggaagaatccgcaagtcgctccgtattccggcgccatattggcaatagtcgcccgatccgcaagcggaagctcagcaacaccaggaccgaagaattcaacaaatttattgactacgcctttttcacgcagcacttgagtgactttcagcgccaagtcagtcgccgtcgttccgttaggcaattttccgacaagtttcgcgccgatgacctcaggaacagggaaatatgaaggctggccgagcattcccgcttccgcttcaataccgccgacaccccagccgaggacgccgattccgttaatcattgttgtatgggaatcagttcccaccaaagtatcaggataggtcacaagttctccgtcttcctctttcgtatggacaacgcttgccaaaaactcaaggtttacctggtgaacgatacctgttgcaggcggaacggcctgataattgttaaacgctttctttgcccagcttaaaaatttataacgttctgcatttctttcgaattctaagtccatattaatggctaacgcatcttccgtaccggctttgtcaacttgtacggagtggtcaatgaccaggtcaaccggaatttcaggattgattttatcagggtctccgccgacagaggccatggcttttcttaaagatgccaggtcaactacggccggaacgccggtaaagtcctgcagaataacccgtgacggtttaaacggcacatcgatatcttttaattcagcagtaccccatcttgctaaattttcaacatgctcttttgtaatgacgcgtccgtctacctgacgcaaaacggattccaaaagaaccttaatagaataaggaagttttgaaacattgccgacccctgcgtcttccaatgcttttaatgaatagtagttgtatgttttcccatttgaagaaaatgtttttcttgcttggaaaacgtcttgtgttgcgactttttgctgatttgtcattctccaaaatcccccttcaatgatcaagatcgttctttagatgaatgttcacattccatcacaattttctcacaatttcatcttagtataaaatcatacataagtaaatatcaatgtttttattaaatacaataagatcgtcttatcagcatattttcggtaaattttgtccgattttccgcctcatacaacgggctgtaaagagccatattaatgttgaggtgatgatcatggtaaaacggaaagccaatcatgtaattaacggcatgaatgatgcgaaaagccaaggcaaaggcgcgggttatatagaaaatgaccagctcgtcctgacggaagaagaacggcagaacaataaaaaaagaaaaacaaaccaatagccggaacaccttaaaaaggaggctttaacatgacaaataaaaatacgagtaaagatatgcataaaaatgctccgaagggccataaccccggccagccggaaccgctgagcggaagcaaaaaagtgaaaaaccgcaaccatacaagacaaaaacataatacaagccacgatatgtaaaacagaccccggtgtctgtttttttgtgccattcacccatttaaagcttctgcatacgttatagcaaggctttttaatatggaggaatgcttccatgaatcactcaaaaaacgctgaagaatttgatgatacggaagaatggctgcggcagttttacgaggacccgtatgcttggtatgacgagacgctgccgatcgatctatatgaaacaagccgtcagtatatcattgaagccgacctgacggccctgaagcaggtgcaggcgatcaccgtcactctttcgggaaatgagtttatgctctctgttaaaacgcttgaacggacattaaacaaacaaatggtgcttcctttttatctgaatgacaaacatattttcactgatttcaccaaccatattctgaccgtctccatgaacaaggagcctaatgagactcctgcctcattttcctttcaatttcctctataacataaaaaagccgctttcatccctcaatggaagcggcttttttgtccggtcatatcagtcatataccctcaaagtgaatctcccatggccaaatagcagaatcactatacgatagaatatgttctagcaaccgaattgactggacatctatcattttttctattctttttttcatgtgttcttctattctgtcttcgtttacaatatggttaaagtaaggaggagatagaacaatgctagaaggctggtttatgtggtttattttattttgggtcatcgtgatgatcggattgctgtctatcggcggattttttatgttccgaaaatttttaaaacgcttaccgaaagaagacggccggtcagaactggattggcaggactattatattgaaaaaagcaggcacttatggaatgcgggtgacaaggcgtttttggatgaattggtcgctcccgtgccggagctctttcgggatgtagccaaagcgaaaatcgccggaaaaatcggtgaactttccttagcggaggaagctgaacaaataaatcgtgatttaatcatcaggggttacatactggccactcctaagcgtgatcatcaatttttaaaaaagcatctccgcgaaaaacagattgatcttactccttatcaggccctgctcaaataaaaaacctttccggcggacggaaaggttttaattcatctgaatatcagcggtcttcagttcattcgaaagtttgcggtaagacataaacatcgcgatgcgccacggaacaatcattccgaaagccagaatccaaaacattccgcttaaagctccgtaatcaatcgtcgtgctcaaaatggatttcatagcgattctgataaccagcaaaccaatcaggataaacacaaacgcttttgaccgttttaaatagatttcattatttttaatctcaaatttagatgttttaatcagaaaaatagagaagatcacgcccagcgtaatggcctccaaaaattcttcgcccgtcactctgaaaatcggaaaaaggaacataagcgctcccgtactcatgaaaatcggcgggagaattatttttttaggtgaagcgggcttgtcggaggctttaatcctgacgatcatcacggaaatggccatggccgctgcaataacggatgaaattataatcatcatctttatcattcctttgcttgcacggagtttgatactatatactatactccaaaaacataaaaaaaaccaatttgaaaagagaacacgtttacgttcccgttacccggcctacggcctccagcactttagatgcttcaaacggtttaacgataaagtctttagcgcctaattcaatcgcttccagaacgatccgctgctgccgcatggcggtgcacatgatgatccgggctttcgggtcaaaagctaaaatatcctgcagcgcctgtataccgtttttgaccggcatggtaatatccattgtcaccaggtcgggacggattttttgatatactgccagggcttcctcgccgtcagccgcttctccggccactgtgtaattcgccgtttccagaatctctctgattttcgccctcatgaacttggcgtcatctacaactaaaactcgtgtcatattcccctccacatatttaacattaactagtcttattgtaccaaaaacgaaagggtatataatagttcaaaagttattaatccgttacagacccgtaaatcctccgaaaagatttgacagaacgatcagaatgtagctcatccagttaaaaaacagcataactccgatcagaatcataagaatgccgccgattttcatgataagcagctgatgcttgcgaatccaattcattctggtaataaaaaatgaaagaacaagaaaaggaatcgcaaaaccgagaacatataaaaacatatacggcactgctgaagaaggatttgtatttgccagcgaaaacacggctcctaaaataggcccgctgcacggcgaccagccggctgcaaacgcaagaccgatcagaaccgaaccgataaacccctccggacggcgcttaaagtgaatgcgccgctctttcatcatgaatttcggctgaaacacaccggcagtaatcagcccgaaaagaatcagcatgatagcgccaaactggcggatcgcttcatgatattgggtaaaaaaactgccgataaacgaagttccatatcccaatgcgataaaaatcacggagaagccaagcaaaaaacaaagtgtatgcacgaggccacgcttttgcagcatcaccttttctgttttcacctcgtccatactgacaccagttatgtaagataaaaaggcggggtacaacggcagacagcatggagaaatgaaagacagaaatccggccccaaacgtcagaaagtaattaaaactcacgatgacacactcccttcgagttatgacaaaatcatttcatttttttaacactttcccgagaaggattactttttatagaaaaagcttatataatttaatttgacatcgagatattatactccttcttatttgaaaaacagtataaatgtggatataataatagcgactcaggtgaaagatttatgtatgaaaggatatatccctgtgattagagagcatctattaaatgaaattgaaaaaaaacgggcagagctgcttaaaatcgtcatgacaaacggaatgacatcaaacattacgatagaactcagccaggagcttgaccaccttctcatacaataccaaaaagaactgcacaccggcagttggggtgaaacatgacgcaaaaataaaaaaccctctccgggttttttatttttataaccatgtatctctatatcataatctgtacgtattatttcgcttgattattcatggctttcatcatttgattaattttcttttgagaaggtttcattcccatttgcatcatcatcatgcgtaacatttgttcattaataggcggattctttttcaaatagctcatcatatatttacgagcaataaaaaacccgagtgcaacacctatgagcaatgcgacaacgcccactaggatgccaacccataaagtcattttatttcctccttcatgttgtctagtttaaagtgtactaaaccaaaggctattatacaacatttacatctctttttcctcgtttttagacaaaatttctttccctgaccggatttaaccacccgtagcgccgtgtcttgaaatccattgcaagaaaacaggggctgattttacgcagaatctcaaagaaaatcgtttccgcctcataatctcccgaagccgcaatctcaattaaactgtctttcatcatgaaggtggcgcggcccttttctccgggcagtgtaagccggtaaatggaatccaaacggctgtaactcattcggtttaaatgcagctggagccgctgatgcatatgtatcaccggaatcggttccgttatatattgaacttgcttttctgtcatttgatattcctggggtgtcagatctgtccaatgatagtctcgaaacaactcaaacatagccgtttcccgcccgaagtagtggttcgcaaactcatcctttatcaggtgcgtatagtaatgacgttccatttcctcatccccttttacagcgcttcgttattgctttctattatacaaaaggagaaaagaaagaattgtctattactgttacgccgccccttctatttttgtcgcataaacaggaaaaagaggatgatttgactcatcctcttttgtctcgttatttgtttagaagttttttcacgcggtcaactacgttttctgcagtaaacccgtattctttcataattgtttctcccggagctgaagcaccgaaacggtcaattgcgagaacgtctccttcaagaccggtaaatttgccccatccgaagcttgaacccatttcgatcgcaagacgtttcgtcacattcggaggaagcacgctgtttttgtactcagccgattgtttttcaaagcggtcccagctcggcatgctgactacagatacgtgaatgttttcttcagccagtttcgcttgagcttcgatcgcaagtccgacttcagagcctgtcgctaaaagaagggcgtccggtgaatcggtttttgctttggaaacggtataagcccctttttccacgcccgcatacgcttcttcagcctgctgatcaatcgtcggcaggttttggcgtgtcaatacaagagctgtcggatgatcttggctttgaacggcaaccttccatgcagctgcggtttcatttccgtcagcaggtctgatcacagaaaggttaggaagtgcgcgtaaagaagcaagctgctcaatcggttcgtgagtcggcccgtcttctcctacggcaatactgtcatgcgtgaatacataagtgacagggagtcccatcaatgatgccagacgaatggcaggtcttaaataatcagagaatacaaagaatgtgccgccgaatacgcggaggccgccgtgaagcgccattccgtttaatgcagcgcccatcgcaaattcacggacaccgaaccagaagtttttcccggcgtagtctttggccgtgaagtctcctccatttttgattgtcgttttatttgaacccgcaaggtcagcagatcccccgacaaagaaaggaattttcttggcgatcccgttcagtacctcacctgaagatgcgcgggaagcaaggctgctgcctttttcataaacgggaacttcctgatcccagtctttaggaagctcgcctttcatgccgagtgacagctgttcagcaagctcaggatatttttctttataagccgcgaacagttcattccattcctgttcttttttcgagccggcttcttttacagcttgattgaaatgcccgtatacttcttccggaacataaaaatcttcttcaaacgtccaagcatacgcttcttttgtcagcttgctctcttctagtcctaacggagcgccgtgaacgccggatgtgcccgcacggtttggagaaccgaaaccgatcgtggttttcacttcaatcaaagtcggttttttatcattctggcgcgctttttcaattgcagccgtcaattcagcgatgttgtttccgtcctcaacataaagaacttcccagttcattgcttcaaaacgctgctttacattttcagagaaagatcggtctaaatcgccgtctaaggaaatgtcattagaatcgtataatacgatcaggcggcctaattcaagatggcctgcaagagaagcggcttcggaagaaatgccttccattaaatcgccgtctccgcaaatactgtatgtataatgatcaactacgttgaatgaatcacggttatatgtctcagccagatggcgttctgcaattgccattcccactgccattgcaatcccctgtccaagcggcccggtcgttgcgtctactccggctgtatgcccgaactccggatgtcccggtgttttgcttccccattgacggaactgtttcaagtcttcaatgctgaggtcatatccgcttaaatgcagcatgctgtataaaagcattgaaccgtggcctgctgataaaacaaagcggtcgcggttaaaccagcccggattctgcggatttacattcataaatttcgtccacagcgtgtatgccatcggagcggctcccatcggcatgcccggatgtccggaattcgctttttcaattgcgtctatagatagtgtacgaatggtggcaactgatttcttttcaattgtatccattataatccccttccttattgttgtaccttttcatcataaagcgatgctgactttttctcaactctttcagcttaaatttgagataaacttgttgaaaattgtcgtaaagcacatcctgatattagtatatacgaaaaaagaatacgtattgccgtattctttctgtttagtgaagattatttttctgttgttctctttttaatttttcaggggtgacatcgttgccttccggatcaatcacttttacgctctttaacgtatttttcattgaggagcggaatcctttcaaatactcctggcgaagcttttgctgttcagctttttcctcatccgttattgtgtttgatttagctttttgagccaattcgttaattcttgcgattttttctttagaaatcataataagctcctttggtgcgtgttgattatatactactaaaacgcagtcttttttacaactgatgcgcgtcagctgccttctgtgtctgcggtatattcctgaaaccgccggtgaaccgtggctttggacacgtcatagccgaatcctcttaaggtcgctgcgatttctgcaaaggtaagcttgttggctctcagcctgataatttccgaaaccggaacctcttttttttcttttccgctgttttcatgtctgtttttcagattccgttcaggcttgtagccgtttttcacggctcttttcattccccgccggattttcatattgtgaattttcctctgatattcctcaacaatactgacgatttcaagtaccatcgaatcagcttcggaaagctccagttcacctttatgagccgtcgtatatattttaacgttctccctgtaaatacaatgcaaaagcgcaatcttggcgtttcctcttcccaatctcgtttcgtcctgcaccaatatcgcgtcaatatgtgattttttaatttcatcaagcatttcaaatactccgtcgcggtccatttcgtaaccgctggctttctcagaaatgactttcacgacttccatgccgtttgcagcagcgatctcactgagctcctcttcctgtctttttaatgacgtttgctgctgttctttgtttgtgcttacgcgggcataaatgagcgccttcatttctctctttcctctctaattgacaatggccagctgatatacggccggatgcttcttcttaaccggtagaataagttcgtctccgggctttatatcagcagtctggagatgattattctccgtcacccactcaatgaaatcttctttattaatgtgtttcttttctgctacatgatctgcaagtgaccagagtgtatcgccgtcctgaacctttattttaacatattggctgagggactgatcatttcccgcacatgaaacaagtaaaatagcggcacttaaaatcgcagtaaacagcccgacaaatatgatagattctttcgccatgtaaacaacctccgataagaatgtttgttcgctttttatatctttcagtatatacgaacaaatgtttctgtcaatcgtttttttcgaacctatgtttgtactgtcaggaaaatcatgctataatctacttaaaatcgacgttttgaggtgcgaaatatgacgaagctatcaaaaaggcagcttgatatcctgcgttttattaaagaagaggtaaaaacgaaaggatatccgccttctgtaagagagataggagaagcagtaggactggcttccagttcaaccgtgcacggccatttggcgcggctggagacaaaaggcctgatcagacgggaccctacgaaaccgagggcgattgaggtattggatgaagaagaagtccatattccgaaaagccaggtcgtaaacgttccggtcatcgggaaagtgacggcgggtattccgattacggctgttgaaaatatcgacgagtattttccgcttcctgaccggatggttcctccgggcgaacatgtctttatgttagaaatcatgggagaaagtatgattgacgccggcatttttgacaaagattacgtcattgtcaaacagcagaacacggccaataacggagaaatcgtcgtagctatgaccgaagatgatgaagcgacggtcaagcgcttctataaagaagacaattatgtgcggctgcagccggaaaatccgacgatggagccgattatcctgcaaaacgtaagcattttggggaaagtgatcggcgtattcagagccgtccattaattctattaaacttcatttatcgtaaaaaacccctctgtaaggggtttttttgcataaaaaaagcagattcgccctggcttaagaaacgaacctgctaaggaggaaaaacttacattcttattatccgacatcgcacttttgaagtcaactaataatgtttccctcgagaaacttttcattcatttttcaactttttatatatttgtgcgtgatgaatttgcttttttatcttttctttgggcgggcacgtcaaaaaatttatatatgaatatttagtacatagtgcaataagttaaatataaatataaaaaaacccgctgcctttagcgagtatctattttcaatcaaaatgataatattctacaccgtagaaccctttaatatagacgggaccacagacgtttgaagaactttcaaccagaatcctgtatttgtgatacggatcaattgattttttatcttgggcactgaggtttaaccagctgccgctgtagtttttagaacttaatgtataaaaatttccgttcagcgccatccgctggagtttcatgcttaaaccgcacgaagagttgttcattatggtgaacttatagcctaaaaagtaatcgtcggcagctacagcacccggattttcaatatgaaactcttttgcgtttccctccaaagtgaagcttgtttttgatccgaattcagtggtagccgctttagctgagtgtattccgctaaaacataataaaaaaacagcaatacatatccagtattttttcatttgcatccccctttttacatattttaacttgtgaatcctgtgatgtctattcacattttactttataaccactatatacctgtttaaaaatttgcggattgcttacaatgaagactaaacgaaataacgaaggtggttcaaatgaaacacgtaattgctttcgcttctaaaacggcgctcacacttgctttactgtacattgttctggatcttatgtaccaagtaacctttttaaacgttctgtttattacagtgatcttaagtttaatcacttattttgcgggtgattgcatgattctgccgagaacaagcaatttcacagccgttgcagctgatttcggaatttcattcattatattatggatattcctgatgaacattggcgggtttaatgtctctcctgccgcggcagcggttatctctgcactttgcatttctgtttttgaggcattttttcaccggtatttgcagcaatatgtacttcccgaagattataaggacacaacagagacggatagcacgctatggagctatcaaaccgaggcgtctgaagaattagtgccggaaaaagaccctcaggaaaaaacataaaaaggaggcaatcgcctcctcctctttttacttttgcttctgatcgtcaagcggcagctgcagcagtgagtctgtgcctgtcgctttcggcgtttttccgtcccatttttcaatccatttatatttgatcatttcatcggacattgatttcttaatgatttcgttatagtcagcgatcccttccgcttcaatttttttctttttcgcttcggcttcggctattttaatttcagtttgtgtccgttcaagttcctgtgaagacttcacccttgcatcgatggcttcctgtgtggctttatccggcttcggtacgccaagcgtcagatcatcaattaaaaatccgagactcttcatatcatcagcaaatctcttttgaacatcggccgcggcttcagcagatttttgcccgtatgtgtcaataaccgagtatttgctgattgattttcgcgccgcatcccacagccttgtttttaaatatgtattttcaatcgtttcgacgtctaccgccccgaatttgttaaacagatcgactactttatcaggctgcacgacatagttgtaagcgatatccatttctatatttttaccatcagaggttgccacttttatattttcattattcactgtctgcatacgcaccggatattccgttactttattaaataatccgactaagtgccagccttggtccaatgtgtcggattttaccccgccattcggtgagtatacaaccccgacataaccgttcggtattttttcaatgaatagtgacgctgtgacgcccgcaattaaaagggctgcacctataatcacaccgccgagaattttttttgtgtttccgcgcttattttcgctcatgctgatcttcttcctcccatgacttttttaattttttggctccgcttcccacttgtttaaagattggactaagcatcagccataaaccgaatccgatgatgacaagaagaatgatagacccgatcatcactttcatttgcccacctcttttctttcatcctgtcaattatgtatacgatcttaagaacttaaagtttcataaatttcaaaagaaaaagccccgccgacaaaataagcgtgcttattaataattgtcactgataaaatcagaaatcgtttttgtaaattggtaaaaggtcccgttttgtgcggatgctctgcttttcagcgtaaaggtgtcaaatagtgattttctgaagccggtgctcatttcgatttgaatactcaatccggatgaagattgattggcaaggttgttcggactgacgcctgcgtatttatcatttgtgccaagaagaacggcaggatacccgtgccgtttcagcacatcggtcaagagttcggcccgttctctgtctgtaccgccgatttttatctttttatcatcactgccgtaaccgtgcaatgaaatgacattagagtgccctttcaccatttgcacggccttggtttcatcgaaatgcgaacttgtcaaatgcagagctgcattaccggctgattttaacccttcaaataaatataaactccggttttcggcaatttctctggctaactcactggtccccggctctatgcctccgccgtgtatagctaatatgaggacagaagggtcatgctcccgcgttgaaatggaaaaatcggaaggatcttcattcagctttaattcctcgaaactgccgtaaagatctgaagcggcatcagcccgaaagaacggcagaagcaaaaacggtaaaattaaaattgaaattccttttttggttattgatggcatttgtatgtttatgttacaatacaaatgcttcagcctttgaagcgaacggcagaacagggtgactttggacggtttcttctgctctgcctctttgccggctgctttacggtctactcttctaaccctttttgccataacatcatcctttcttttgtttacacttttgtcacaatattatatacgttggacaaaacctccgttcatcttgaagaataaaaacatcaaaacaacctctatcctttagcctaaaaaagtctttctgttcaaagagacggaaagcttaaatgataaaaatgaaacccgtctccttagttttgtttgatttcccaattcaagaatccccgaaaaaatttgaatgtaactgctgtctccataaaaaaaagactgctgttaagcagtctttttttcgttttatttcgtgcctgttgatcccagtccgccgcggtcattgttcccgagcttgtctacttcgatcagctccacttcaggcattttcttcatgattctgaattggcatatccgctcccccttggaaatgtcggtatcccgaagcgcgaatgcaggaaaaaaccagaagtcattgtcgcctttataagattcatcaatgactcccattgaatttgtctgaatgatcccgaaatgcttatatgtacttgaacgcggaacgacatgggcctcgtatccttccggcagttccatcgcaactccaagcgggataagtttgaattcgccttttttgattgttatatgttcagctgcccgcagatcaatccaatcgccctgttcaattttactgattctcgtttgcgtatcatctgaatatttaattttgatttgtaaagtcatgttcgctgctccttttgcttccctatttcagtcgtattgatgaccaatccgtgccccattataccatttaactgataagaatgctgattttggtgtatatgcagccgaagaggaagcacggcgaagacaatgagaataaacctaaaatgaggacccctcctatcagtttttccctccattttcacatgacagcttcaattacaataatgcaaagctatatgtccgttcctttcaacagagcttttttaaaatttcgcctcggtttcaaaaggaatttcgttctgaataaagaatttgaagaataagcgcttaaagggcgcgcgattcttttctgtcccctgcctcaggcgcttatatcaaaagaaagaggtgtctttagaatggttcaatttaaaaactttcctgatccgtctttaaacgccccattgcagtctcgccctgcacagccctctgaattggagcatctcaaagcaaggatgcagaattttattaagcattccgcaacggatgataatcttgagatcgcagatgcccgggtgacggcggaaggaatggtcacctcacttttaaaagaacggcttgatacagaatacgaaatgcttatgaataaaatcacccgggaagtgaatgtggaggattacggagcggtccctgacggccgggacaatacagaagcctttcggaatgcgatcgggaacggccgggtcaaagtaaatgttcccgcaggagaatttttggttcaagggataaaactcccctcatggactactatttccggtgagggacaagggattaccgtgcttaagcttcatgaggacactcccgcatacgaatgggtcattactaacgatgattacgaaaatggaaaccgtaatatttttgtccagaacatgactttagactggaatcctgaccgtcaatgcggagtcaggaaccccggaggacagtgttccagctgtttaacgtttgctaatgtgcaatacggctggattaagaatgttgaaacggttaacgcgggtctgcatggtatagatattacatctccgacttacgatcatttgcctgaaacagaatggacgaaagacggctgccgttatatatggattgataactgtgtggcatacggcgccggagacgacggcattaccacccattacagcgaatatattttcatttccaactgccattccggaaacccccgcggcacagagcatgctgagggcagcgcaaactcgaacggcattgaaattgacgacggctctaaacatgtgtggcttttaaataactatacgagcggaaatatccgcgggattgaggtaaaggcgcacagcctgtggccggcttctcaaaatgttcatattatcggtcatgtttcgtatcgtgatgtacgttcatttgatattcgtcatatcggccatcatcaggcctcagaccccgaaagcacgacggcttatgatgttactttaaccgattgcaccgcgattgaaccggtattcaatgccctctatgacggtgtaaccccgagggcgctggtcatctctgcctataaaaacgttaatgtaaacggattcacagctattggtgatccctcatacgactatggcgggaatccagtcgtggctcttcaataccgcagtcaaaatattacgatcaacggcattaaaatacgcggctttacacaagccggggttgacatcaatatatccggcggatctaataaaaccgattatgttaaaattttaaattttgatatatacaagtcttctcctaaaggcatcacaatcggcggaggccaatataacgtaaatattatgaacggtacgatgatcggagacggcggttccgtcggaattacgtcccctaacagtcaggctgtcattctcggggtgcaagcggaaggttacagcgctgccgcatctataaaaggacagacttatgagcagatccccgtcaatttaaagggaggcgcacagctcgcgaccagctccggttttgcattcaacccgacaagcgccgttattgcgggaacaggcgatattacggccagaggtgacagaaatgcgatcatcagctcttccggaggttcaagttccgaaggttcaagggcatttatcgccgcttcaaacaatgtccatattacgggcggcaaagtctccagaacgattctgtcatcagaaagcattacattggaagaaccatacacggttgccggagggcatcagtccatcaaatggaaactggattcagcgggcggccacggtacgttcgccggagctgtcacctcttccctgtcagggtacggagaatattttgaaagtgtaaccggccagaagattcccgccgggacgatcgtcacagtgaaaggcgaaaaaattgaaccggctcacgtcggtgattatatgctcggcgtcatttcagaaacagccgcttttatctcaggagccgcaagcttcggatggcaaagccgctttttgacaaatgagttcggcggtttcatatacgaaaatgtgactgacgaagaaacaggagaaacagtacgcgtaccgaaacaaaacccggactgcagtccggctcttgaagctgactatgaagcacgcgcggccagagacgaatggcatattgtcggactcaacggccggcattacgtacgagtcgacagtacggtcagcccgggagattatatcacggctcataacggaatcgggactaaagccgcggaaggctggaaggtattgaaactgacggccttatacagcgctgaaaaagggtacggcattgcaattgcggttatcaaataggatctcaatatcaggatcatcttctctcttttctatcgggcgggtataatcctgttttttataccgaatgagatgcctctttttcagcataccgtttcatttgtccaagccatccatgctttctgtcatagaatactaccgtcagatgaaaaaaggaggaatatgagtatgagtatggacatgggtatggacatgggtatggatatgaacggacattatgatcaccagccaaagcagcctaaacaaaagaagaaaaagaagaaacaagataaaaagcatcttgattatgattacatcgttgtttataaaagaaaatgcaaaaaatgctgctgacttgacatatcaatactttttacacccggtaaatcccgggtgtttttcttattatgacgtttctccgggctattttcacccaaaatccggtcatcctatcacaatacataaaaagactctattattttcttcccttttcgcctgattaaaagtatttcatttacagaaaacaacataaatagaatgacatgacttttgagaaaatctgctctttgcttggtcaatttttctgcgataccatgaatttgcaacaattttaaaaaatttcctcaggaggtcatagacatgaaaatcgccagaacaatagtcggatcatgcttagctttatctctaacaattcctttcacagccagtgcctcagcagccagtcagtctgaacacccgaatgcgcctcacgtttcacccgttgcaaatccgttagaaagtaaattatcccaaacagcaggccaaaacgtaaaagcagcaggtgttgatgccgggctgaacgtaaacgtagatgttctcggaatcgcagatcgcatagctgaagcagttaagtcagatcaaaaccgaaccggctgggtaaaaaatgtcatggaaacaacattttacgcatcaggacagaagtacaacgtcatggtgttcaatttaaatcaagaatatgaagaccgctttaacggcgttcaattttacggatcagccgtttatgacggcattacttacggaatctgggtcttcgaagacggttcctttaataacaaaggagacgggggctggatcaattgggcattcagaggatggttcgatcgtgataatcagcatattgaattccacagaccttaattcagagaaaacttgcggcagcgcccgcaagtttttattttgataacgggatactgtacatttttcaccgttataacgactatacttgaagtgcgggctccgatcgcagccccggtaaagtctttcaaagtgagggtatgccatgtcaaagtctttaaaaatagtgttgtggagcatattggttttcattatcttgttagtgatgatcggaatcgtttcttacaatcaaactccgtctgcagaaagcgcagcaaaaagaatgctttacagcgtctaatcaattttaagccttcatcggctttttttatttaccgcagaacacttgaagttcttctgttagatcgttacgttcccattcggaatggagtatacgcgtatatcaccaggcagtccgttttgatacatggttccgattatgcctttcgcatcttttttctctattcctcatcacatccacttttttcatgctgctgctcttgaaaccaaccaatcatttcttcagcctgttccgttgaatcaaaaggttccaatcctaatagcgtgttacattttcatttttaaaaaaacaagccaactgcgcaccctcttcgcaacttctcaatgtatgagcctatccgtttctattacaggaagcagtacgattcctccttttactcattttaacggatggccatgtaaaggaaatatagactaagaaaccttttttcaaaaagtaaactagcatccctatcaaacttttcatttcggcatagtatgtattaatcctctttaggaggtgagattatatgggattctcaggtggttatggtagctcctttgcgttaatcgtggtgctattcattttattaatcatcgttggggcttctttcctcggcggttattaagaatcctcttacctccgcatccatgtcagcagcacctccatgatcgtacggcgccataaatgaaatgtttatggcgctctgctgtttttacccttttcattcacacattaaaactaaaaagatcggccgatgaacatgcagccgatcagtaattcatagattattgtgtaaggtttacatcgatgacgttatagaaggcattggaagtatccgcaacgtcccatacccccaaaatgacatgatacccgcttcgatcagtcggcacaaaaatcttatgagtcagattcgtatctgccttggaaccgtcgtggtttaccgttccgattaattcaaattcatctcttgacaaaggtttattcggattccagtttttcttggtgatataatagtgccactttgatgtcgcatgaggagctgtgtagtaccaagtaaaggtgttaaaaccgccgcggatgttttgttttacccaataatctgcagtctgcttgtctaaaccgaagtcaatttgtcccgatcccccatttgcagacgcaattcttccatccggcggacctgcagccggaaatcctttcggcccttctacagactgaggattatcaatgacggagccatatttctgcgcagcggccgtccagcccaatgtttgtttctctaaagctcccatgtacgctctgctgacgggctcttttatatacccgtgcgcagatgcatcacttgaatagaaagcgcctccaatcccaagagtaacagttaaaactgcagctttgaccaaacccttcattactgcatcatcctcccttttttgttaataaaatccctttcggtatatacacttcacgatagaggatgaaatgaccttccttttcttgataggaaaaagcaatgaggttcgcgctttcccctttgttttttataatcataaagaaaaagccgggccgattctgttgtcgaatccgcgattgccaaaaaccggcccgccccttatgctcagaacttcattcgctggatttgcgggtttcttttcggataaccggtgctacttccgctgctaatcgttcgatgttttccgcggcttttttaaacggcatacctcctatatcgatttgcgcgagaaatcgctgatgcccgaacaactcatattgatgcatgattttttcaatgatctgctgtgaacttcccacaaataaagctgtttcttttccggacgcccgctcaaaatctttcttcgttaaaggctcatcgatcccgtgatatgaatgaacgtgagaccagtaatttgaatgatacgggtaaaattcttgtattgcctgttcattcgtttttgaaatgaacatatgtccggtcacggcaaccttcacattttccggaggatgaccggctttagaagccgcttcccggtatttgtcaacaagcggcttagatgacatcggatcaccgctcagtacagccaatgccaaacccgcacctgcacgcccggctcgttctgcgctttccggagtccccgaaacacctaaccatagcggaatgcttccgcaaaaaggccgaggagaaatttctgcctcgcgcagcggcggccggtaacgtcctttccaggtaaccgattcttccccggaatttaattttaaaaaaaggtcaatgtgttcttcaaacagttctttataatggcctacgtcataaccgaaaagaggaaacgagtctaaaaatgcgccccgtcccgcaatgatttccgcccggccgtctgaaatcagatcaagcgttgcaaaatcctcaaataaacggacgggatctgcggtggataatacagtcgtggcactggtcagcttaatattttcagtaatctgtgaaatcgctgataagatggccggcggcgaagataccgcataatcaagacgatgatgctcgcctaccccgaatacatcaagccctgcgtcgtcagccagtttcgccagcttcatcaattcatctatccgctgctttgcgctgactgttttccctgtcagaggatcgggatataattctgcaaatgaataaattccaatttccatacaatcacggtgttcagccctcacatttctctcctcctgcactgtgtaaaaaagcttttatgttattctattcagccgttttataaataggaatttattcaaaataaatacagaagcttaacatgcagaaggccggtatgagaggaaaaaaagtttccggcgcccttcaattctgcccattatactcatgcagccggactaggcaagaacaaagccggcacaagcggattcgaattcatgtgttcgttttcagtccaattcaatccaatcgtgatattgatcataaagctttcctattcttccggcatcaagagcgatgacttcacaccctctgtcatcatatagaaagaaaataatatcttttgtcatattcacaaagaaaacatcgggatacccaacggaacagcccccgaaccttggcttcagcggaaaatcttcgtggacggctgccttaagtaattggggaatacgcagatctttccgtttacataataaagaaaactgctgcatttcatattcttctgcatcatcttcttcaaacggacaggggcaggtcttcacctggatccgatataaatcatccttacacttcagaaacggctgataaacctttaattttctcggatgattaccttgagttttgtgcttatatacgttggcaacaaggaacatgtcatcgctatgttcaaacagttcattgaaaagtgcggcggtttgatgatgaacaagctgaaaatactcaagattcaaagcaccgctttcattaaattgatacatattgccgccgagagaaaaatgaagtcccacgtcccattgatgataaatgccgggcactaattttaaagtcggaaacctttccttcagataatcatttattttcattcaaacatctcactttccgtttcccgctccagagacagaagaagccgaaaacattccgcttatttctttttcacccttgtaatattattccgattggaatacaatgaaatagaacactgtgaaccccattgatcagggtggatgctggtcacattcatcctggtcctttcttttacacaagatcgcaccaactttgatcccctccgtttccaaccttatacatatatttcaatggtattattttcttatacataagcatcaagaggtgtcagctttgaacaacatcagaagatgaagagcatatttccggtctcaccgcaaaatgggtcttgactctgaactgcttttcacattttgattatcaagcgcttctttaaattcatcaaaatgaattgaacattgctgattcaaattacttcctgcaccttctgtcgctaaactgcaaaatgtccgtcacaatcatcctctctctaattttacaacattgctataatgattttcatgtttttcccaaccttcaagctgaatctttttgatcgttactaggtaacctaaatacaaaaaaacctgctttcagcagggttttttcggtaaaggggagattatttccccacaaattctattacctatgtttttgttttaaccattctttctttagcaatgcgtattggtaagtgttttcatatttaggtgttccatcctcgtgggcagtaaatgaaataaattcaagaaaataaccttctttacgcattcctaatctctcacatagtttttgtgacctgcagttatcatcttcaacatatgcataaagccttcttgcttctttttgcataaagagatactcaaagaaagccttcgcactttcacttgcgtatcccgccccttcaaaacgggcattgaaattccaacaaacggaataggtatctggctcttcttttaaataaaatagttctccgactagatcattactgtcttttaaacaaactgcaatataagagtcatctcggcttcttttttgaacatttacggcagcttcttctaacgtagatattctgtcatcaagaaaacaattcactctcggatgtgccgaatattccaacagaccttgtgcatctctctcggtaaaatttcttaaaattaagcgatgggtttcaattttttgcatttgcagtctcctgtttcattgttatcgacctttgaaaagaacttcttcgtttgttgaagaacttatcacaatctatttttactataatgatgggtgttatcatctttgtcaaaaacaataatcattcatttgccgcccgcaatgtaaagtactgaacaattttcgtgaaaaaccctcagtatcgaatataaaaacgagcaatagtaataaaacaaagttaagccattaaaagcttattgagtattttttcaaacttatttacgctcatcatctcatgagtgagaaatgtccccttataaaacatgctgaaagtcgtccaaactgccggggatttttgcgccatatcttttgacgttattctcagggcctgaaaatgaagtcctttcttttcagtcagttcctttaaatgctttaacactccgactgcaaatgggcattgagctgtataaaatattgtgattccctcatcattaacggaattacttttcacctgttttttaaatacaggaggatgtgcatgttcattccacgtcagtgacatcaactgaaaatagggttctgcttcatcttgcacagcaaatcccatatgctcgaagaaatgcttatcacttaaataagggagttttttcttccccactatatgaactatcccatccataccgcgggattttgcatctgacacacatttttctaacaagtgttttgcatgtccgttattcttatatttacctgagacccaaaggcaattaataaacataaaattaggtgcgcttaccgggacccacgcttcttctgcaggtaaatattcaataaaaactttggcccgttcgtttaggcggtagaacaccaagccatcactcatccgatctttgagccagctcttcttttcatttaccgcatcctcatattgtttcgtacctaacgcacagcaaatatgattgtcatcaatattgtccctggtcaactcaatgtattccatttttcctcacccgctttcttttggaaacatcagctttacttccgatgaacattgtaatttctcagaaatatagagtcccagtaccaatatatgaacgcagcagcaatgctcattatgtaataaatgaaacttctgaaaaccgtgaaatcaattgacggattacctatgtgccagaacaagaacacagctaaaaaagcgactgcggtataaatgaaaagatgaaccaaactaaactttttaggcttctttcttagccatagttgcacaggaacagcaaacaaaaagtaagtaatgaatgcgtaaaaagcaatgataactacagtaaccaatgcaattggcacaaaacccgagtatacaaacatatatagcccgaaaatcaaaccatacgacaaacttgaaaaagccaatgtgtaggtatagctctttaatcttgttgaattcagcttcaagtcaccgccccgttcatttacttcgcacttacaatatcgtagttttattgtctatttgtctgttttaatcactatttgacattcaattttataatctgtttctcctgtttcaatctttgtatcatcgcggttaactttatatttccctccatacaaacttgctgatatcgggtgccttataccactctttaactgatcgtaaatgtatttcttgccttcttgaaaattctttcgaggaacatgtcctactttgcaatcatttacatagacagctatagcttccggatcgtacttgttgttctcttctaaccgcaattcacaatttgagaaaaggaaattatgataaataaatatcggctcatcaaaagttgattctagaatctctttatttgtcataccatcatatttttcatcgaagaaaaagctgtcttcatcctcagtcttgatggctttcttaatatctttttgatagtgtgatgttcctgcaaccttaaagtctatatactcgaaaaatgcagacttttcttcatatttccttgagaagcctgtctcttgaatcaagattgggaaattttcttttttcgataccatctctgtttcgttattaacgccaacagtgttcatattattatttttattctcattttgttcatttttaactttgttcttgaaaaagttgagtatacccaaatgtacccctccatttgaaataaaagattggtttaatcaaaaaactcatcatcaataaaatcattttctcttgcaagtttattcgaatcctttttaaaaaacctttgcttcaatttttctttaactgttaattttttgtttttgtcctggcatatatgacatatataatctccgttgtttgataaatgaataagtaatttatcgacacctgaccttttgcagatacacatcctgtgctgaccatcactaaacgaaatatgaccgcaagcatttacgcttgcatatattcctgaatgttttttatgcatgtccggttttatgtagtgcgcagccaatcttctgcattttaatgcatattcatgctcttcgccttctaaagcattaaattccttatcagttaaatctaaggagcactttcctgttctaactttataacagtcatgtttacttagcctaaaataaaaagaatgtttcgtaggatttattaactgatccaacctgatccccttctctttaaaagaatgattttatgcaactccttaaaatttgtatttcgttacttttattgtaactttagtatactatgattacttttaattatcagtatacccataaaaaaggtcaaggaaataccttgactgtgtatcgctcaccaatctgcatccggctcatcgtgttcaaatccgtgaaatccacacatctccgcagccggctccttttgtgaccaataagtaatgatttctgtttgcatcaccattcaccttatcagccgcgctcaagttcaaatgatcacccgtgaaattcttttcactaagggtaaaatcatatcctgacggcgtaattctctgcagtgcaagtcaaatatctatagaaagattatgaccgcaaattcaaagcattctgtgcatttggagatgacaaacccccatttaaacacccttcggatgacaaatcatccgtagaatcctccctgcatagctccctcaatttttgtagagacacttgtccgcaaaaatgtaagggttttcaaaagaagagtcgtgtgctaaattgtaagataagtaaaaattttctgcgaatatttgaaaggggtgtatgatttgaaagcagtagtagcaacaaaagacaaaagtatagcgatcgtacaaaaagaattacgtcctttgcggcatggtgaagccaaagttaagatggaatactgcggtgtatgtcatactgacttgcatgttaaaaatgctgatttcggggatgttaccggcgtcactttaggtcatgagggaataggcattgtgactgagattggtgaaggcgtaacaagcctgaaaaagggcgaccgcgtctctattgcctggatgtttgaaagctgcggccgctgcgaatattgcttaacaggccgtgaaaccttgtgccgtgatgtaaaaaatgccggctatacagttgacggcgcaatggctgaagaagcaatcgtagcggtcgattacgcaataaaggtgccggaaaatttggatcctgcagcagcaagcagcattacttgtgcaggtgtaacaacttataaagcggttaaagtcagtgaaattaaaccaggtcaatggatcggtgtatttggagtcggcggtttaggcaacttggctgttcaatatgcaaaaaacgtctttaacgctaaagtgattgctttcgacattagcgatgaaaaattgaattttgctaagagcttaggcgctgatgcggttgtaaacagtttaaacgaagaccccgtcgctaaggcaaaagaagtgactaacgatttagggcttgatgctgtggtcatcacggctgtctctaaaacccctttcaatcaagcgattgatgttgtaaaagcaggagcccgtgtagtcgcagtcggtttaccggtggacaaaatggatttagatattccacgtcttgtgttagatggaattcaggtagtaggttcattagtaggtaccagagaagacctgaaggaagcttttcaatttgctgcggacggtaaagttgtacctaaagtgacaaaacgcccgatcgaagatgtgaatgatatttttgaagaaatggagcaaggtaaagtgaccggccgcatggttatcgattttacttcctaatcattaaggctgccgggaatgatacggcagcctttaatctctattcttgctcagcgccccacccagactgaataagactttgtcatttagttcagaaaagaaactttacagaccattcggcggacatacattttgcaagtactgcctggactaaccctgataccaatataattccaggtcattcattgccgaagcgtagctgttatgaggaaacccaccagaggttcctcataacactaaaaacctactcactgcactttttacagcagaccttatcagagtgtttgcttaacactttgtccattctacccacaggcatcttcttctcactcggaagtgtaagataagctgttatctcatcccctgattttaatgtttttccgcagatagagcattttaactcagtattaaagaaattttttaatcccattcagaagcctccttatttacctttataaagtaatacgttaatgctttataaaagtttcaggttaaagaaatactccttgtccgggaatttactttctttcagttgttacgtacccgcacagggttaacaatcgtcttgttctttaactcacagtgagaagatcgccttgtaaaacattagcgtaaaatcatcttcatgctttgaccagtttactgcagtgcatggattgttaatttgtgacacttatttgtcctctttaaatttttcttcttctctcaacttgaaaaagaaggaattattttataaatattgtaaatttatagctgtatcacattcactattaagaggaggaatacgaatgaaaaagaaaattattgccggcgctcttgcttttgggttaattccgctaatgggggctgcagatgtttctgcaaaatctttgccaaatcaagataaagtcatgaaacctgccggttggtcatgtgacgctccgtatattgcgtgtcagcctttttctggcggtaccggtaagatttcattcaactatcaaggcagctctccaggaaaaatcagagtttttgtagcgaatgacggcagcaaatctttcaaattcaccattaattatcctaatgggaatacactcttatcctctacgacactaaatgcggggaaaacgttcattcaagaattcagcgttaaccaaaaaggagaatacatcctgaaatatgatagcggcaccggtgatagtgtcgatggtttctttagatctgttgagatctaaattccgttaggaaagtcggcagttttgccgactttcttttccaagcattctgcaggaataaacgtaaagtgtcgaataaacatatgacctttttgaaacggaaactttatctgcaccacaaacccgcaagcagcctccttgtatcgtaccttccgtccctttgtgatttgttttgatttgtcgtatactgcgcttgcccgggaaatgatgaatattttcgttaactataatttccctgtacctcttcgtatgtggctctgcatgatgaagtaacgtcatggctcaccactttcatccacagttttattgcatgttgagccatatccctcctctttaaacagcaaaccgtcccatccatttctctctttccattatttcatattcttagaagctcttcattttagacttaatatccattttttcttatttagacttaaatctatgtcgaaatttatcgtccggcatattatgtactatcctaacaacaggaggtggcaataatatggggaactacggtggaaattacggtggaagttctttcgtattgatcgttgtgctgttcattttgttaatcattgtaggtgctgcattccttttctagcacattgacgatttatattcgtctcccaaacattgcatcccttagttcggacagacgccataagaagttttatggcgtttttactttttaaaaaaatctatctaagataaacattttttattttcactctggtaagcgggagagttttctcccctgcctgcgccaatattgccgctatgaagaataaggtgaacaattcaattcggaataaagacttgttcatgaacaaaacccctaaatagttgttaaaaaactaaggcgtttttaattcatcaggattacagaggttgtgaacttaaaaaggatattactcacctttataaaattgtcatcgttagatttagtcactgaatcttttttgtaagggtccgcccacaaaatgcggtgttcacacattaaatcattttcacataaaaaaaccggattcctcttctaaaaggttccggcttttctttttgttcggtatttgtcagttaatatgcaggaaatatctggtgacgtgcacacacccgctattataatatttcaatagagccttctgttccatgaacgcggattcgctgcccatcttttatcaattgggttgcattttcaactccaacaactgcaggtaagccgtattcacgcgcgataaccgctccatgggtcatcagtccgccaacttcagtgaccaggccttttatggacacaaacaatggtgtccagctgggatcagtatagggggtaactaatatatccccatcttccaaatcggcatcttccatgtttaaaataacccgtgccctgccctctatgactcccgaggaaacgggcagcccggcaatcgctccggccgggagattttctcgtttgtactcgcctgtaacgatttcaccgtcagacgtgataacacgcggcggagatagtttttcatatactttgtactcgccttttcgtgtgctgatgatttggtaatccaatttatttgtgcgtacgacttcctgaagttcttcaaaagtgagatagtatatgtcttctttttcatgaataacccccgcttttgcgagttgttcggcttctttcagtaaagcctgcttataaacgaagtagcggctgatcatgccgtattttggatattctctgaatccgctgaagttccggatgatttggatcattcgtttagtttctctggctttttgttcaccgtccggtaattgcttcaatcggtctaataactcttgttctttcttcaacgcctcctgccgcccttgctcaaatttccgctggctggcatttggctcaaagtttttgagattattaagaatcatagggacaagtgcaattggtttttcgctccatcgagttcttgtgatatcaatttctccggcacatcgcattccgtacttgttgagataagcatagatagcgtcatgggtttcccgcccgccttcaaacttcaccagcccatccaaaaagtgatcatcttttacattctctaaataggcaattacttctggataaggacggatcacatcggcgacgtccaatagcgcaagccccatttctgaagtaatattatgaggtacagattgagaaagcgtatctgctgcgtttttttcacctaaccactcgttcattttttcgttaatccatgatgaagcatccattgcagttcgaatcagcaccgaactttttggattaaataaaatattctttaattcctggatatcttccaaaataaaacgaaataaatcagatcctgatttcgtctggatgttttgttttaactcttctatcgatgcctgactgctcttaatcaaatcagaaacaattgcaggatcgttttcagcttgatccggcatatctgcattgcctttgccgggaatcggcgccgttttatcatgtatcggtttaatgaaatcatctcgctctattatggtcataagtgcgtcttttaagagcggatcgtgctgccccataccttttaagaaaacttctctgacattaggggatgccagttgatgtgtgacatcgacaaatagccttccgccggctttacgcatgggtgcagcagtcgtcaacagaaaaaaagacaatccaaggggttttatgggatccgtcatcatttgctgatgaccgacagagatatagacgtgattttcttgatcgttcgcttcaggaacggggtataacgttgtgatcggacgactttggacaatataaaaagtatcgcggtccaaacaccattcgatatcttgcggctggccgaaatgagcttcgatctgtctcccgatacgtgccagctgtaaaatttgttcatcagtcagtgtttgaatcttttgctgatcaagatcgatctcccgtgtttccgttccgccttctcttcgttcatagacagccttttttttggtttctattctcttatcgacgatttgcccgtcctgtactttataacaatcggcagatactaagccggagaccagtgcttcaccaagtccaaaaccggcatcgatggacagcagctttcggtttccggtcatcggatcagcggtaaataaaatccccgaagcctgggggaacaccatcctttggatgataacagataaataaacttggctgtgatcaaacccattttgcatacggtaaatgaccgcgcgatccgtaaatagggacgcccaacatttactgatatgctgcaagatcgcatcgacgccggtaatatttaaataggtgtcttgttgaccggcaaaagaggcatgcggtaaatcctcagctgtcgcactagaacgtacggcataggcatgttcttcgccgaaccgggagagatggcaagcgactgctttgactacatctgaaggaatttctgcttccataatggtttgccggatttttttgctgacttcaccaatttgatcccgattctccgctttcagcatggtcagttgacccaacagcgcttgtaacgtttcgttttgttcaatggcttttcgatatccggcggttgtgacacaaaatccttccggtacttgtattccttgaatttttgataattcccctaaatgtaacccttttcctccaacgagcaaaggctgtgttttttcaatttcgtgaatgccgagaaccaaagaactcattctatatctccccttcaaaaaaatttgacaagagcttttcagcatgatataatcataatataagatggataactatgacttttaacacagaaagcgcgcgtgttctgattatatcaccgtgtctgtttttgtgcaatataaaaagaacctggccaatttggcgaggttctttcttcattttctaaggaaatcctgaagttgagtgatacctgtgaatccattgcagaaaggctatccccacggattcaagaaacaggaaaatctcaataataaaaaacatcccccacgcaatgtgaggggatgttttgtgtgtatacttctcatttcatcgtcatatgagtttagactgatgcagtcacaacttacaagaatgcttatctgtttccttcaatagtgttaacacatttgaagttatattagcgctgccgctgctttgatatccctaaactgtaatcgcttagtgtattgcgcgggagaaagaattgcattccatggtttattaatgccggctttctcatttgttaacagatttataaaaccaaggccattgataatgagtggccgtttattgttcttcctttgacctcctgaaaattaggtttgtctaaagctctttaaagctgtattgatatcttttgtgtgaacgtaaatgttcttatacaactcgaatagtgttttatatttttgaacattttgttcttttggataaaatgcagctgcttcatgaatgaactgctctgcacattcttcaagagagtcaaaccacccgcttccgaaggcagctaacatcgcagcccccatggccggaccttgttcattttctaacttaaccaccctcgtattgaaaatatcagcctgcatttgaagccacgtttcatttttagctcccccgccaatagagacaaccgtatcaactgattttcccgcttcgcggaatagctcaattgattcatataaagagaatgtgatgccttccattatcgccctcaaaaagtgctctcttttatgggctccgtccattccgatcaagcttccccgaatagatgaatcagcatgcggcgttctttcaccgactaagtaaggagtgtacagcagtccatttgctcctatcggaacagattccaccccccgcaataattgttcaaacgattcgttcggcgcaaacgttcttttaaaccagtccaagctgtaccctgcagcgagcgtgacccccatcgtataaaaagaatccttttttccatgattaaaaaagtgcactttccctttaaaatccctttctttgtcttcttcacaggaaagtatgactcctgacgtcccaatgctgcataacgtttttccggaagaaagaataccggctccgacagcaccgcaagcattatctgctcccccagcgtacacttttgttttttcgagcagccctgtcttcgccgcaacgctcggaagcagcgatcctacacagtcatgggattccacaagcggaggacaaatttctgctgaaataccaaattgattgcaaatctcatcgctccactctttgcgggtcatatgtaaaagtaacgttcccgccgcatcggagtattcggtgtgaatggcgccagtcatgcggaatctcacatagtctttcggaagcagaaaaacagcggttttgttaaaaagttcaggctcatgttccttcacccataacattttaggtaatgtaaacccttcaaggacacgattttttgtgatatcaagcagatgattgccaaatgtctcggttatcctgctgcattgaggcgtcgttctggtatcattccaaagaatcgcatgacgcagcacccgccgatcttggtcaagcagtactaatccatgcatttgtcctgaatagctaatcccgtcaatatccccggcttgaacgttggatatcgaaatcaattcagccaacgcttcaattgtttgctgcacccagtcttcaggattttgctcactatatcccgccttctcttggatgagcgggtaacttttggacgtttctgcacaaaccttgccgttttgattgactaaaatggttttaacagcactcgttccaaggtctattccaatgacatacttcattttttcactccttcctctctaaatagatttccgttgaaatgacccgccataacagtaacttcatgacgggcaattccgggaacttggctgcctgcatcttttatgcgggatctggagcttcttttttcatttggttatacctgtaaaatgtattggtttaatatcgcttttagccgttcctgtctccctgattcgtttttaattggctgattgttcagcgcatattgctcaagtgtcttaaaatcagctcttccttctgcaatttcaagaccaatcccttcagtaaagctgcggtaacggtgttgaatcacatcttcaaacacacgatcttcgattaatttgtgggcggctttcaaccctcttgcaaatgtatccatccctgcaacatgggcatatagtaaatcatcaggctcaaaagaagatctcctgacctttgcgtcaaagtttaatcccccgcttccaagaccgccattttgcaggatttcgtacattgctaatgtcgcagaatataaatctgtcggaaattcatctgtgtcccatcctaaaagcggatcaccctgattcgcgtcaacagagccgagaaggccatgcactctcgccatgcgtaattcatgttcgaatgtatgcccggctaatgtggcatgattggcttcgagatttaatttaaaatgattgtctaagccgtattgctttaaaaaggcaatggttgttgctgcgtccgtatcatattgatgggtggtcggctcttttggttttggttcaatcaaaaactgccctgtatacccgatttccttcgcataatccactgccatatgcataaatctggccatattatcaagctcaaattttaaatcggtatttaacaaagtttcgtacccttcacgtccgccccaaaatacatagttctcggcgccaagctcttttgctgtttctaatcctttttttacttgggctgcggcatacgcaaatacatctgcattacaagaagtcgccgcaccatggacgaaacggggattcgtaaacatgtttgcagtattccataataacttaacgccgctggttctcatgtagtcttttatcatgtccacgattatatccagattttgatttgtctcttttaacgtacttccttccggtgcgatatcccggtcatgaaaagcaaaaaatggcgcatccagtttttcaaacagctcaaacgctgcatctaccctcgctctcgccagatccatgcctttatagtgatcccacggtctctgcatcgtagctgcgccaaaaatgtctgtgccgtcagcggtaaatgtatgccaataggcaatagaaaatcgcagatgctctttcatcgtttttccgccaattacttcttgagaattatagtatttaaatgctaaaggattcgtggattctttcccttcgtaaatcactttgtttacgctttcaaaatagttgactgaaccggaatgagagtgagccatgtgtgatttcccccttaaaaataaattctaaacttgatgattcgaatacagatgattttatgtcatgttatatattagtttgttgcctaaacaaactaacttattttcatcttatataacctcatcagtattttcaatattttttttagttttttacgaacacattagatataataaaggttggattcgctatgtactgcgtttcgcacgataacacagaacgttcaacttaatttaaagattatacaaacggagtggatgaagtggatatcgctgatcaagcctttgtcaaaaaagttaaccaaaagttattactaaacgaaatacttaagaattctcctatttcaagagcaaaattatctgaaatgaccggattaaataaatcaactgtttcatcacaggtaaacacattaatgaaagaaaatcttgtatttgaaatcggtcagggacaatcaagcggcggcagaagacctgtcatgcttgtttttaatagaaaagcaggatactccgtaggaatagatgtcggcgtggattatgttaatggcattttaacagatcttgaagggacgatcgtccttgatcaacaccaccatttggaatgcagctctcctgaaataacgaaagatattttaattgagatgattcttcactttattgcaaatatgccgcaatctccgtacgggcttattggtataggcatatgcgttcccgggttaattgataaaaatcaaaaaattgttttcgctccgaactccaactggagagatattgacttaaaatctttcatccaaaagaagttcaatgtgcccgtttttattgaaaatgaggcaaatgccggcgcatatggagaaaaagtatttggtgctgccaaaaatcacgataacatgatttatgcaagtatcggtacagggataggaatcggcgttattataaacaatgatttatacagaggggtaagcggattctctggagaaatgggacatatgacaatagactttaatggtccgaaatgcagctgcggaaaccgaggctgctgggaattgtatgcttccgaaaaggctttattaacatctcttcagacaaaagagaaaaaagtgtccactcaagatatcatagacctcgcccatctgaatgatattggaactttacatgcattacagaattttggattctatttagggataggcctgaccaatattttaaatacatttaatccgcaagccatcattttaagaaacagcatcatcgaatcgcatcctatagttttacattcaattaaaagcgaagtatcgtccagggtttattcccacctagacaatagctatgaattattaccatctatcctaggaaaaaacgcaccggcattgggaatgtcctctattgtgattgatcattttctcgacatggttcataactgaaatgtacaaacttctatgttttacgctcatctttaaagatgggttttttgttttgttattttcatcctgaatgggagcatttctgacgtgtttttccacacgggcattttctaatatgaaaaaggagttccaaaatagaaagctcctttttcatgcggacattcatttttctttataacggaaatatctgaagtcggccggaatatgatttccgctcgtatcttggcattgcatccctacaaaagctcctgtaaagaatcccccgccgcggatgtaatcatctgataatttttttgattccaatgcaatatcgattttgtaccaatcttctttgttaaatgaatagaaataataatatttttcgttttcaatattcacttttaaatagacgtacttgacttcacgaggaatcacaattttattttttaacggttgtgaaaaagagaagttatcacatatcgttaattcaagaatacggccaagttcttcatcatgcgtgacttgaagagccgtccagttctctgtattgtaatagttcaccaaaccagcggcttgctgaaaattttccggataaaacgcaacagccgtttccgcttcaaaatggagactttgccagcgtctggctacaaatgcctgagtaaatgtcgaagttaaggattcatggccgtataatcgtaaatgatttggcgcttgagttaatgaacctaatttctccgtaaaagggattcttaacgtttgaaaattaatatttaatgtcgcatcctcaaattcatcaacttccggatacgtgtcttcaaatatggtttcaggtatagaagacgcatccacctccaagctcccttcttttccgccttctacataaggccagccatctttccaatagagcttttgaatagctgtttctctgcccaaaggacaatatcctcgctgctgaaaaattgaatcatcgtccgggtgaatgggacgtcccgttaaatgagctaaataccactcgcctgtatgtgtgtgaacaatggatgcatgcccgcatttttgcaatgggtttcctggatcatgccatgacgttaagattggattatcgggatgaacttcatatggcccctcgatatttgcagaacgggcaattgtagcagcgtgttcgaaccgcgttcctccttctgcggttaataaataataatagttcccgatatgataaaggtgcggcgcttccgtcagctttctttcagttcctttaaatatcactttcggtttaccgatcagtttttgctccttatcagaatattcctgcatgacaatgcctccaaaggagtgccgatcaatacgctgatcccataacatatttaataaatatttttttccatccgtatcatggaacaaagaagcatcaaaccccgagctgtttaatgtgatcggctccccccaatcaccatcaatcgtgtcacaagtcactaaataattgtggcaatctttccaagcgccatctacgaccttaacatccgtatagatcagccaaaactttccgtcgctgtaacttaaacatggcgcccagaccccgcctgaattaggatttcctttcatgtctaattgcgaaactctctgtaatggatgtgcaactaagtgccaattgactaaatcttttgaatggtgtatctggactcccggaaaccactcaaatgtagatacagcgatataataatcctctcccactctgcaaatactcggatcggggttgaatcctttaagtactggattgataatcttcatgcagaacgcctcctcagctattttctgttgactatcatgttttaagctttgaaatcgtcaatatgatccaaataaactttgtctctattctctaattctcgaaccatgtttttatattttttctcatctaagttatagaaattaatatcaatcatggccagaaccagtaagaacacgggaataatggttgctgtaattaaaattcccgtcaatgcctccggcgtttgcgcctgatttgccacatatccaaactgatctagaaccaaacccggtacaacccctcccaaggccatgccgaatttaaagaaaaatccgataatagcgtatatgagaccgcccattcttttcccggtcttatactctccatattcgattgtttcaggaataagcgcccacatatatcccccggcagtgagacttcctgcagcggccagcaatcgaaaggaaagtatcaggaatacattacttggcggaacaaacagtaaagctaagaggccgatcatattcagtaataatgcatagtttagtaatttcttcttccctaataattgatgaagctttggaataaacggtaaaatgaccaaagcaggcaaacttcccaacaaaccgtaccacttcactaaatccgctctttctaaattatacgttacgtaatagatgccaaccgaattactgattgaattcactccaaaaataataataaaaaaaatacttagtacaactagaggccgattaacacgaaattgctcaaatatatccgataatttaattttttcttcagatttttgaagcgtgacacgctcttttgtgcttttaaaacaaaagattaaaaggcacccgcctataactcccataatacccatggttagctgccagccaagagattcgctgccggacgtatcgcttaaataagcagccagtaagggaacaaaaaatgcaacgacaagtcccccaagattcgcaaataacatacggacagacgttatactaacaacttcttgattatttcgggtcattgcagaggttaacgcgccatatggcacgtttatcattgtgtatgtaagcgataaaccgacataggtgatataggcatatattaatttcccaatatccgaaaaatccggggttgtaaaacagagtattgccagtatgacaaatggaaaagctccgaataaaagatacggtctgaagcgtccaaacctgctatttgttctgtctactatcgttccaataaaaggatcagcgagagcgtcgatgattctaaccactaaaaacatcgtaccggctgttgctgccggtaaaccaaatatatctgtatagaagaacaaaagataagtagacactgttgcataaattaaattacatgcaaaatctccagacgcatatccaactttttcaaccatgctgatcttctttacattttcactgagcatgatttcctccccttttcgatcctttacataaggaacatgatgaatggtataacatttcttcaattttatcggccagtgaggtctttataaaagcgctttcaaaaaatgatagcagtttactttcacagagcactttcatcgtagtgaacaggataaaagcttggctttcgttttatatatacctccaattaaatcgagcctcttatcccccttccatttaagacctttacatgaaggacaattaaagcggtttattagtttgttgatcgaacaaactaacttgatttcatattataaaatcttttctgctttttcaactcttttttcagaaaatttaaaaccgatcaaaggacataccatgttgtaattgccggctccttcgacagacgttaagtaaaaaccctatgtgtcacctgactgatttattaaatgataagcacttccatcatcttttgtttagaaaaacttattaagaaacatgcacttgaaaaaatgcgaatcatatataagtgatatcccgtttaattggttgaggaggatattatgaaacctatgctgccttttgaaaaatattttggtgatttagaactggtttatgcattttatggagctatgcctaccggtgttactgtctcagaaaccggtcgtatattcatttgttttccgaaatggggagacgatgttaaatttacggcagcggaaataattggagataaattgcagccttatcctgattcacaaaccaatttggttaactttgagaatatcaaaatgactttcatcagtgtccaaagtgtagttgctgatggaagaggaacgctttggatactagatacagcggcgcccaatttttctgaaccaattaaaggcggggcaaaattagtcgctgttgatttaaaaaccaatacaatcagaagagtgtatacctttacagaagatgttgtccttccaacaacctacctgaatgatgtccgatttgattttcgtgtcggaactgcaggttatgcctatataacggattcttcttccaaaggaccaggagctattatcgtcgttgatttagaaaccggaaacgcatttagacggttaaatggagcaaatccaacttcaccggattcctcttttataccgaaagtagaaggcaaaattttgatgaatcgtaacaaggatggttcaacttccccatttaggctggcatccgacggtattgcgatctctcccgacggaaaggtattatttttttgtcccctgaccagccgccatttgttctctatctcaacagaagccctgagagatagaaatatatcggacatggatttactttatcatgtggcgtattggggagaaaaaggcgcgtctgatggaatgattacagatgcaaaaggagccgtttatgccggagattacgagaacaatagtattcgaaagatgctgccgaatggcacaatggaaaccatcgcacatgatccgagaattttatggccggatactttttcgattggtccggatggatacttatacgtcatcgtgaaccaattacatcggcaggctagttttcattatggagaagacttacgacagaaaccttatagtttacttcgtatcaaaattgatgaatttcctgctcctgctttttgaaaataaaaatggccggttcaattttagagcataattggcttcatttagcctccatcctaaaccgaataagggattacaataaatacgtgtcctcaattatggagttagattcataacttcattttttttggtcaaggaccaaaatatcgacctcttaaccttttgaccaaaacttaaaaaatcccctgacaccaatagtgccaagggattgagagattaatactgagacatgtattgttcgcgctcccacggatgaacctgtgtgcggaacatatcccattcgatttcttttgcttcaatgaagtgttcgaacaggtgctcgccgagcgctgcaaccatgacttcgtttgatttgaattcgtcgagagcttccgccagtgtcgccggaagatctacgatgccgttttccatgcgctcttctttgctcatgacgtagatgttgcggtcaatcggagccggtgcttcaagtttgtttttgattccgtcaaggcctgctgcaagcaatacgcttaacgccaggtacgggtttgccgccgggtctacgctgcggacttcaacacgcgtgctgatgccgcgggaagccgggatacggatcagcgggcttctgttttgcgcgctccatgccacgtagcaaggtgcttcatagcccggaacaaggcgtttgtaagagttcactgtcgggtttgtgacagccgtaaagcttgtcgcgtgttttacgataccggcaatgaaatgttttgctgtttcactcagctgaagatcagcgtctttatcaaagaatgcgttaacgttatctttaaagagtgataggttgcagtgcataccggaaccgtttacgccgaacagcggttttggcatgaatgtcgcatgcagaccgtgtttgcgggcgatcgttttgacaaccagtttgaaagtttggatgtcgtcacaagaacggatggcaccggcatatttaaaatcgatttcgtgctgaccaggagcaacttcatggtgagatgcttcgatttcaaagcccatttcttcaagctcaagcacgatatcgcggcggcagttttctcccaagtcagtcggagccaggtcgaagtatccgcctttatcgttcaattcaagcgtcggttcgcctttttcatctaatttaaacaggaagaattcaggctcaggtccaagattgaaatcgctgaaaccgagttctttcatttctttcagaatccgtttgaggttgttacgcgggtcaccttcgaacggcgtgccgtccggattgtaaatgtcacagatgaagcgtgctactttacctttttcagccgtccacgggaagattacaaatgtgttcagatcaggatataagtacatatcagactcttcgatacggacgaaaccttcgatggaagaaccgtcgaacatgcatttattatcaagtgctttttcaagctggctcacaggaatttccacgtttttaatcgttccgagaatgtctgtgaattgaaggcggatatactttacgttttcctcgtttactaattttacgatgtcttctcttgtgtactttgccatttcgtaaaactcctcctctaaaaggtaaatgtatatagcaaaacagttgctaacggattaatgaaagaatcgggacatgtcaccttggcggaaagtatttccccgctggaaacggcctgcctgcatcagttcgtttttcagaagctttctgagttcgtcatcagacagattgtgtttcatcggtttggcggttttttcggatttttcttccggttcggcagatgccttatccagaatttgtttgatccccgccatattgacgccttgttcaatcagatttttgatttctaacagtttatctacatcatggaatgaaaataatcgtctatttccttcgcttctcgctggaaatatcaatccattttcctcataatatcgaatttgccgggcagaaagttctgttaactgcatgacaatcccaattggaaataaaggcattgagcggcgaatgttatcactcatctcaatttcctccttttcttatcttagtctcattataggtgatgttatattttgtgtcaacacaatgtaaggaatcttaacatcaaattctttgaaaattgcaaacgccctaaatcagctctttttccattaaagcatttacggcgctgcaaatcgcatttttcacgtgcgcgtaggttaatcctccttggacatacgcgacataaggcggtctgataggtccatctgctgataattcaatgcttgctccctgtacgaaagtgcccgctgccataatgacatcgtcttcatatcccggcatatagctcggataaggcgtcacatgcgcattaatcggtgatgcatattgtatcgcctggcaaaaagcgatcatcttatcagggtcctgaaactcaactgattgaatcagatccgttctcggcgcattccatgcagggtttgacgtaaagccgagcttttcaagaaaacgggcggtaaataccgctcccttcaagctttgcgccactacatgcggagcgagaaagaaaccttgatacatttcctgcagtgaataaagcgaagcaccggcctcacttccgattcccggggaggtcatccggtaagagcaggcctcaatccacttggctttccctacaagatagccgcccgttttagcaaggccgccgcccgggtttttaatcagggagccggccataagatccgctccgacgtggcagggttcccgctcttctgcaaattctccgtagcaattgtccacaaaaacaatgacatcctctttgatttcctttacgaaacgaatcatctcttcaatttcatttattctgaaagatggacgattcgcatatccttttgaacgctggatgccgatcacttttgtattcggccggattgcagcccggactgcttcaaagtccactctgccttctgatgttaaatcgactgcattgtatccgatttgaaattccttaagcgagcctgaatactccccgcctcttactccgacgatttcctcgagtgtatcgtaaggcttgcctgtgatataaagcaattcgtccccgggtctcagcacgccgaagagcgcgattgaaatcgcatgcgtaccggaaatgatttgcggccgcacaagtccctcctctcctccgaacacatcagcatagatcttctccagtgtatcccgtccgatatcatcataaccgtatccggttgaaggcgtaaaatgcgtatcgcttactttatgttttctgtagctttgcaggactctccattcattccgttcactgatttcttctattcttttatgaacggcggagatttccgcttctgtttcttcggcggttttttgtaaaagagcgccgtgggtcagtgtgtcaaacatgttgtgtataccttccttacatgaatttcttcaattctccgagtatgctttgttcttcctgtacataacctgagacttcgtagcgttcattttcttcattaaaataaaggctgtcgatcatggtctctgatttgatgcgtgacatcaatttgccttcggcggcaggcacatgaacttcatacggtgtcatcagctcccggcgcaaataagcttcgatttccgcttttagtttcgcttcatccccggcgattcgggcgctgatcatgatgtggccttctcccgctgtcgggatgaagtcaggaagtgtctcatcacgtttgttataagcggtcagcaccggaatatcatctgcctcaagctcttttaacagtccgaggacagtctgttcatgcccggcataatcttcattggatgaatcaatgacatgaatgatcaagtctgcttccttcacttcctcaagcgttgaacggaaagcggcaatcagcgtcgtcggcagatcctgaatgaagccgaccgtatcagacaaaaggacgctgtagccgcttgggagcgccatctttctcgtcatcggatcaagtgttgcaaacagcagatcttcttcatagctgtctgagcttgttaattgattgaaccacgttgattttcctgcattggtataaccgacgagtgcagcctgaagcacgccgttctttttgcgtctctcccgataacggcttctgtggcggataaccgttgacagctgcacgttaatttcgtgtatgcggtttctaatgtggcgccggtctgtttcaagctttgtctcaccgggccctctcgtcccgattccgccgccttgtcttgagagattgattccttgtccgctcagacgcggcagcgcgtattgaagctgggccaattcgatctgaagctttccttctctcgtcttcgccctttttgcgaatatatccaaaataagctgcgtgcggtcgatgatcttcgcttcaattgcagtggcgagtgatttaagctggctcggtgacagttcatcattaaaaataaccagatccgcttcaagctcttcacacagcgccttcagctcgtctactttccccttgcctatgtatgtagcggcatccgctctgttccgtttttgcgtaatccgggtcagcaccgttccgtcagccgtttttgtcaatgaagcaagctcttccatggaatgttcaaagtgctcatctgtcatgtgcggaagctggcagccgaccaaaatgaccgtttctttttttccttcctgttcgttcaaatggatgttcctttctgtgtcgtattgggcagtagtactatcataccaaacccgcagggcgtataccacacatccggcgggttttaaagagagaaataaaaaagagacccctcaaaccggctgagaggtctattcgtgagctgccgcctcatcttttataagtaaatcctggctcttgatcgtcattaaatcgtttttcaagtattggtctcccattaaaagtctcatggcctgagcgcggatcgatttttcaatcacgtttctgacaaagcgcccgttgctgaatttaatggggcttgtcgtgcttttcactgtcattaagtaatcttttaacttccactcggcttcctggcttaattgatactcccgctctgctatcatgcgctttgcgatgtccatcagctgagtgacagagtaatccggaaaatcgatgctgatagggaagcgcgattgcagaccgggatttaatgacaggaaatgtgtcatttctctcgagtaccctgccaggatcagaataaattcatgctgtttgtcttccatatgtttgacaagcgtatcaatcgcctctttaccgaaatccttttctccgcctcttgcaagtgagtatgcttcatcaatgaataaaatgcccccaagcgattttttaatcagatctctcgttttttgcgccgtgtgtccgatgtattcaccgacgagatcggcacgttccgcttcgatcagatgtcctttggaaagaacgttcatctcgaagaaaagcttgccgatcagtctcgcgacggtggttttcccggtgccggggttccctttgaacatcatatgaagagcttgttttccgactttcagcccttgttcggcccgtttttggttgacgaatatccacgcgtaaatttctttaatgttgcgtttcatttcttccatacccactaatgtgttcatttctttttcaatttctttcagaatgctgtgcttggcttcatttttttgcagggcggcctgatattccgcctcagcttctgcatttgtcagcacttgcttttggccattaagaatgatgttaatttgtccgttatttttataggttacagcgcgctccaacatgctcacctctctgttctctctttatcttactcatgatgaagcggttctgtgacatccgcctatcatcatgaggcccgttttcctctttatctgtcactttttccgttctcttcgggaatgatgttgaatcctgcgctttcccgagaaatatttttcatttcttattgtattcagcaaaaacgggaggacaaaccatttatttttattttccgggaaatgttgggtgtatttctcatttttttcatgaatgacagccgtacaagcaccttttgaatatcatcatatgctgtaatgaggtgatggagaatggttaaaatttttatagaccccggtcatggcggaactgattcaggtgcaaccggaaacggacttcaggaaaaagcggtcacgctggagatcgcactggctttgcgcacgattctgacgaatgagtatgaaggagtttctgtcacgatgagcaggacaagcgataagacggtcagcctgacggaaagaacggatgccgccaacagctggggcgcagattattttttatccattcatattaactcaggaggcggaaccggattcgaaagctatatttaccccggtgtcggagcgccgacctcgacttaccaatcagccgtccacacgcaagtaattcaagcatcgggttttaatgaccgcggaaaaaaaacagccaacttccatgtgctgcgggagacaaggatgccggcgattttgacggagaatggttttgttgatacgtcagctgatgcaaacaaactgaaaacagccagttttattgaaagccttgcaagaggacatgccaagggcttggagcaagctttcggtctaaaaaaaaaggctgacttatataaagtgcaaatcggcgcattcaacgtgaaagcaaatgctgatgcgcttgccgccgatgcggtgtctaaaggttttgacgcgattgtgcttccaaaaggcggcttatttaaagtgcagatcggcgcattctctttcagagattatgctgaagcgttggcagcgcgggccgaaaaagccggatttgatgccttcattgtgcaagactaaatgaaaaaacccctgctctccctttttgggacgaacgggggttttttgttattgaagtatatcggcgacaaaccgagaccaagcttcaagacgatgatacacattttcctctttcagttcgctcagtttcatccagcgcccggcgatttgatctttttctttcacttcgacttgtgctgcaggcgctaactggagcgcagaaaggatgccgatatgcaccttccctacatcgttttcatcatcattgatcaggccgagtgtgacaatgttttgtttgtcctcctcgcgaatgtacaattcttccgccagctcccggtcggtgttctgtttcagcacttccaaaaatgaagccgccccttccatagggttcatgtgtccgccgaagccgagagaaagcttattatggaggcgcgattcccctccgcccgcgagccgttcatacacaaatacctcatcatcgcggcggatgacgacatacggaatcggctgtttaaatcgcgggtcctcttccgcgtcgcctcttctgatttcaaaaaaatgcgcctcaatttgagccataatttttatgatacgttcatcctcgctgttgactccctgaaatgtcagcatttcgttttgaaagacgtcactccgcggtgcagccaagatgatttcatccattttattcatgcccgttcctcctgtcttacctctccactcaagccaaaagagcagatattatatctgctcttcatcttggccaaaataaaaatcttcgtccttaatcggttctaccgtcgcctttttgtagccgttccctttcatggagaagaaatcatgtgattttgttttggtgtttaatccgtttaatacaatcggattaatatcctcttcttcaaagtaaggatcgaaccctaagttcatcaaagctttattggcgttatagcggatgaatttctttacgtcatgagacagcccgacttggtcgtagagatcctctgtatattcaagctcattgtgataaagctcttctaaaagctcaaccgcaaattcgcgaagttccgcttttttcgcttctgtttgtttattgaatatttcctgggccagcagtccgacatatacaccgtggatcgcttcatcacgaagaatcaggttgatgatctcaccgctttgcatcagttttccctgtccgtaaaaatataacggataatagaaaccgctgtaaaaaaggaagctttccagatagacagaagcaaccatcgctttgaacagtgaaatttcatcatctttttgaatggctttgtaaagcccgacaatcatttgcgcttttttctgcagatatttattctgctttacccattcaaatacttcgttgatcgtttcagtcggagcaagcgtcataaaaatatttgaatatgattttgcgtgcaccgcgttttccatcatcgccatgaaattaagaaccgcttttcgctgatggccttcgacgtgctcggccacaatcggcatgcctgtgttcccctgctctgtatcaagcagtgtcaggccggcgagcaccttcatgtacgtatcctgctcatttttacccaaatacttccaagtaagaagatcgccgtttaatgcgatctcttccggaagccaaaactgctttacgttttggttgtagaacatttgggtgaaatcatcttcatgctttgaccagtttgctgcgtcataaatttttgtcactgttaactctcctttaatcaaacgacacaagaaagacagctgtcctgcccggtatctttcgttcttgcatagtaaatggttttgatgcctctatggtgggcatacagatcaatacggttcagatcacgagttgtcatcgtatctttcaaaaacagggtaaagctgattccctgatcgatatgctgctggattgtcgcgatcatatccaccactttgaacatgtccatatcataagcttctttgtagaagaaccagttattagacgctaaccccggcatcgggtaatacgtttttgaatttccgtatgttctttcttcgatccgttccatgatcggcataacggacgccgtgctggattggacgtaggaaatggagcctgtcggcgcgatgcacagtctgtagctgtggtacatgccgttttcggcgacaaacgccttcagctctttccagtcttcgattgtcgggatgtgcatgccttcaaagagcgcagcgattttttcgtatgccggtgagaactctttttcgatgtatttattgaaatattctcccgttgcataagtggagccttcgtaatgctcaaacgtttcgcctttttctttcgcaagctcagctgaacgctggatggaataaaagttcaccatcataaagaacgtattcgcaaaatctcttgcttccgggctttcataagcgatgccgttttgggccaggtagccgtgaaggttcatggcgcctaaaccgatcgacttcatcgctttgttcgcgcgtctgactgccggcgcgttgcggatatccgtcgtctcagatacatgagtcagggaatccgtcgcgagtttcaccgtgcgctcaatcgatttatgtttcatgacattcaaaatatttaatgaaccaaggttgcaggaaatgtccaggccgatttcgtcttcctcgtcataatctgtgtaagccgaaacctgtgacgcctgaagcacttcagagcaaaggttcgagaatttcacttttgatacgtggttattcgcatgctctttgtttacgttgtcctggaacataatgtacggataacctgactcagaacggagaacggcaagcttttcaagcaatttgcgcgcattcactttttcttttttgacacgcgggttgtcaacaagctcctcatacatcgccgtcatgtccatctcatccatatgctggccgtattctttataaatcgtgtgcggatagaatacataagccgctttgtcctcacgtgcaagctcaacgaacttatccggaatgacgacaccgatagaaagcgttttgacgcgcacatcttcatccgcagaaatctttttcgtatcaagaaagtcattgatatcgcggtggaaaatgtttaagtacgccgcgccagagccttgtctttggcccatttggtcagcgtaacggaacgcgttatcaagaagcttcatgacgcctacaacaccttttgtggcgttttcaacatctttaatcgcttcacctttcgcgcggagcttggacaggttaagagaaacaccgccgcccagtttagaaagctgcatggaaatatcgatcgcccgtgaaatatcgtttaaggaatcattgacttcgagcaagaaacagctcaccagttctccgcggcgttttctgccggcattcaaaaatgtcggtgtgctcggctgatattcctgattgatcatcagattcacatattcttttgctttctcagtgtcgccatttgcgaagaacagcgcaacaattgagatccggtcctcataacgctcgaggatttttttcttgtcattcgttttcaaagcatagtcattatagaatttaaacgcactcatgaaggaaggaaaacgaaacttcttagcgtaagctgtcttaaacacttctttaatgtcttcaaaagaataaaggcttaagaattcctcttcgtagtattggttttcaatcaaataatccagcttctcttttaaatcgtgaaagaaaactgtgttttgattgatatagtctacaaaatagctatgtacagcctctttatctttatcaaactggaattttccatcttgttggatcatgatttcgttatttaactggatccattttggcacttgattttgtgacaactctttctacctcctgagtaaacaattcaacgtctttagatgtgccgctgagttcaaatttgtgcaagatcggcacctgatattgtctagagatggtatcggcgctttttgcaaagttatcgccccatactttgttgccgctcgcagcgactcctaataagagatgggcgtatttttcgagaaatgattgtgttgatgccggtacctgaccgaagtttgtcgtgtaggtgaccaaaacaaacggagtgtccacgtggtccatttcgtccaccttgcggatcagctgaaagtctgttttattcacaaaacgctgaacattccctgtctttgaatcaaatatgatttgaaccatccttatcacgacctatcaaaaataatgaatctcttaacactatatatagtatactaacctctcagaaaaacacaacatattgagatcgatttataaaaaattcatatttttgaaagagcggactttggctccggcccgattaacgcccaaaaaagagagcagaacgagaatcatctctcatcctactcaaggtgtcatgtgtaagccgatgtctatcataacatgaaaaaaaactgcttagtagtctagacttttattcttattttttgtaagaatcacattttttttcgctttcaacggtttcttcaatctctacatcagcaccgatttctttcagtacggctttcagagcgcttgtgatggaagcctccctgatcagttctttgccgtcaacgatgatgctggttccatattcatagcaggaatcatcttcacaagtttcttcccaatggttgattatcaccttgtgtttcaatcgtctcaccctctgcatgatcaatgtcagtacttagtgtagcttgtgcggcccgctttgtaaattcgaacgcttgtgaaatttattcaagctcatccagcgccgtttcttttttcagttcgattttattcgttttttcatcatagcggtatatttttagataaccgccctcgacaatgccgaaacgattatgttccagctgcaccatgccttctgtctgcgattcggcatccgccaagccgccgtcatcatccgtcaccaccgtctcgtgattgctgcaagctccaaacagcaaaaaaacagcgatccaaacgagcgtaatcctgattcttctcagttcattttcactttcgaacacgattttccgaacccccttttatctttccgatatacggcctgcaatatacagacgcgcatagaaaaagaccattgttcatggtctttgtcaaaaagtctattcaagctcaagctggacgtttttttgcggggcgaacgtggagatggcatgtttataaataagctgctgcttcccctccgtttcgagcaaaacggtaaagttgtcaaagccttttacctggccgcgaagctgaaagccgttgagtaaaaacaccgtgacgaacgtattgtcttttcggatttgattcaaaaactgatcttgaatattaatcggtttcatgtttcgtcctccttggttctcaatacaatactgtttcgattaaatttccagttttcctgctatgcactcgaaaatttccttttttttctgctcaatatcaacaggcggcgtcatatctgtccatgaaacgggcattttattgcgaaaccaggtcagctggcgtttcgcatatcgccttgaattttgttttaattgctccacggcctgaggaagcggcacttttccatcaagatattcatacagctctttatagccgatcgcctgaatcgattggctgtcccggatattcatatcatacagccgctttacttcgtcaagaaggccggtttccagcatcaggtcaacgcgctcgttaatccggccgtacagtacttctctgtccattgtaagaccgataagaaccgcattgtaaagcagctcccgtttttgggttttaagatgctctgacattgtttttcccgatacatgcaggatttcgagcgcgcggatgactcttcgcgtattgttttgatgaatggctgccgccgcttccgggtcggctgccgcaagcttggcatgaagcgcttccgccccttcttcagccgccagtttctccattcgctcccggaatacagggtcgccggagttttccgtgaacgtatagtcatacagcacggactgaatgtacagacccgtccccccgacaatcatcggcagctttcctctaccggcaatctcggtgatttttcccctcaccattttctgataatccgccgttgaaaaagtgtcggacggctccaaaatatcaatcaggtgatgcggcacgccttctgtctcttcttcggtgactttggccgttccgatgtccatccctttatatacctgcatggaatctccgctgatgatttccgcattcagcattttcgcgagtccgatgcttagttttgtttttccgactgccgtcggtccgacgagtatgacgacaggctgttttttatttttcaatatgtatcactctcttttataaatctccccctaattatagcattcatttcttcaggcacctatccattttgccctttttcctgagcgctaaacgtccgctaccacccgatcggctcgtttccgacaacctctctcgtttttcctttgagcgtatggcggtgcgttttccgtccttcctcccgcggatcgtaaacgacgccgccatgctggatccgaatcggctcattgtaggcggcaaaggtggtctctgaaagctcatggtaatgtgttccgtcaaccctcgggatggcagggccggaaatgccgtaatacctatgaaaatggccgttttcaaacgaggtgatgcccgtatagaaatgtgtatgctcatctgtattgctgccgttctccggctgcgaaaagccttcgatcatatggtagtgcccctgcactacatccgtaacagcccggtatgcgtgtgtgtgcggaggtttttttgaccaatcggactgatacaggcccacaaaagctcactcctttatttttttgataaatgcccaatcaaaaattggtgggctgaatactctgttatcatctcaaatttattcttggaggtacctaaattatgaatgaagaatacacatatgcagcagatagtgatatgagaccgtttggacggcccggatttgggtttggacggccgggcttcgggttcgggcggcccggattcggcttcggcttcgggcggccgggttttggatttggccggccttggtttggttatggattcggacggccgtttggtttttacggcggaccgttcttcggagggcttgtcggggggcttgtcggaagcgctttattcaatccgtacctgtacggaggttacggctacccttactatccgtattactactaagacaatcaaaaagggctcctttcaggggcctttttatataggcctaatgtcttgacttggcgggcaaagttcggatattattttattttactgccttaaacaaaaggcataaggattatgatgagagggggatttgatatgattctgggttatatcttcctcacaattgctattttatcagagtcaatcggcgcggccatgctgaaggtctcccgcggatttacgcggtttttgccgagcgcgcttgtagtggcaggctattcattggccttttatatgctttcacttacactgaatctcattccgctcagcttatcctatgcaacatggagcggagcgggaacggtgctcgcatccattatcggagcgaaatggtttcatgaaaaactggacaagcaggccgtcatcggacttgtattcttattggccggtgtcattctgatgaattggtagaaaggagaagcatgatatgaaaggattactctgcctggcattagccattgtatcagaagtgttcggaagcacgatgctgaagctgtcggacggttttacgcacttatggcccgctctcggcgtcattgccggaatcggagcctcttttatgtttttgagcttctctttgaaaagccttgatttatccgccgcatacgcgacatggtcaggtgtcggcacggctttaacggcaattgtcggcttttttgtttttaaggaagccatgacagctaaaatgatgatcgggcttatttttgtcatcacgggcgtcatcctgctgaaccgttccaagtctcaaaaagctaaaaaaaatcaaacggcccggagctgaccgtttgaactcgtcaagcgcgggcagcttttacttcaacctcaagctccatctccacgtttccttggaccgctcgtgaaatcatacatgaggactccgctttttgcgctaacttcctggcgagcgtaaagtccgtttcggctgcatccggctttaataatataaacgggcggtgaatgattttctggtacgtgaacacaccgttcgtgacgtctacaattccttcagattccatatgtagatcttctttatccaggccgcttctttccatcatcgccgcaagcgttataatataacaggtcgcggccgctccaagcagcatttcatcaggatttgtgccttctccgggtccgtccatttccttaggaatggacacagcggtttccagccggccgcttttaatatcgccgacgtcattgcgatttccgggccaatttgcttttaaataaaagtgatgttttgccaagggacaaacctccttttttttcagtttactcacctttcactggtttgtctttttttaagctcacgaatactcttgattgatcactctttttatcgtacggacaaaccggtaaaattcctccgtttttgtgaattccctttcgcggtaatcaaaattatcaaaaaacgcctcccgctgttctctgctgatctcaagctgtatactcagcccggtttgcgcctggttattgatattttcggtgtcaaccccggccagaccggtttttgaggttgccaattctgtaggaaatccgtttcgtttgagagctctcaccaattttttcgcccgcttccggtcgcttcctccgacaagagtatttttctcgtcgcctttataaccgtgaactgcgataacataatggtgctgcttaatgctttcgactgctgaaggctcatcgaacttggtgctcgtaatatgaagagtctggttatcatgcgcttttaatccctcaaacaggtaggttgaataatcatccctgaaagagcggacgatctcgctcaccccgccctcaattctccctccgtgcggggacatgatcaatacggggctcccctttctcttattgtacgatatatgataatcatcggggtcttcatgttcagccagatctttaaaatctgtgtatgtatcagaagaattcgagggatcagggtctgacgcataatgagcacatcttattagtaagaccattgctacgataatgatgacattaagtaaaattcttttcatcagctctccttctttgctcctttctgaaaaatgaaatattcattatatggatttttgtcaataggtcttatcttaacattctattaacattatcatcagtgaaaaacttcccggtttcgaaaaatcaatggattgtcacggttcaagcgctcaaatgccgggcatcagtgaaaaaaggttgagagagggcaaaaaaaaagggaggaacgcccgaattttcaggggcgggagattcacggccggaaacggacggcatcaagaatacgcttttagaaatgaatatccgcctcccgaagcaaatgcgcaggacagaatggagcccgtcaaaaaagttctcatctgcctttttgtacagcaaaatgccattacagcccgctcatcccctttttttatcataatggtccgttttgaaacggagccgtctctttattcatatatataatatcaatcggaagctgtttttccaaggaatgtctcaatatgatgttcatgtatatactaccttccgccggcttcattacaaaacgaacaaacgttccgtttcaactcgatttcttctcctgaaaaagccgcaagtaaccagcgctcctgaaggacaaacaaactgaccgaacttacggcctgttcatatggtatagagagaatcgccagaatgggaggaaaagtatatatgtttggttactcaatggtacaaatggtgcggtcaaatgctcataagctggactggccgctcagagaaaacgtattacagttatataaacctttcaaatggacaccttgctttttacacaattttttcgaaaaaaaggtgaaaaacagaaagaaaatgtcagtcatcattgaatttgaagagggctgccatgaatccggttttcacagcacaggacaggtcttatcaaaagaaaaacgctgcaccataaaaaagcagtttcaaacaatcaattgctgcagcgccgaagtcacgccgtccgcccttcacatgcttctttcgcaatgccgggatatccgtaaaatctatttaaaccgtgaagtaaaagctctccttgatacagcagctgaatcgtctcatgcaaaagaagtgacccgtaacggcaccgtattaacaggaaaaggcgtaaccgtcgccgttattgataccggaatctatcagcatcctgatttagaaggcaggattatcggctttgcggactttgtcaaccaaaagacagaaccgtatgatgacaacggacacggcacccattgcgccggtgatatcgcaagcagcggcgcttcatcttcgggtaaatatcaggggccggcgccggaagccgatctgatcggagtcaaggttttaaacaaatcaggatcaggaaccttggctgatatcattgaaggtgtggaatggtgcatacaatataataaagaacacacaaagaatccgatcagaatcatcagcatgtcgctgggcggagatgcgctcaaatatgataaagaaacggacgacccgctcgtcaaggccgttgaagaggcatggaatgaaggaatcgtcgtctgcgtcgccgcgggcaactccggtccggaagctcaaacgatttcaagccccggtgtcagcgagaaggtcatcacggtaggcgcctatgatgacaatgatacagccagcaatgaggacgatacggtcgcttctttctcaagccgcggcccgacggtgtacggaaaagagaagcctgacattcttgcgcccggggtcgatatcgtatctcttcgttctccgcgttcatatcttgacaaattacagaaatcaaaccgagtaggctccttgtatttcagtctgtcgggcacgtccatggccactccgatctgtgcgggcatcgctgccttaatccttcagcaaaacccgcagctttcgcctgacgaagtgaaaacattgatcagacaaagtccggatcaatggacaaatgaagatccgaacatttacggagcgggcgcagtgaacgccgaaaacgccgtgccgaaagagtaacctttttatcatgagaacggggtcgtctgcaccggcagatgactccgtttttcaggtgaatagatgaaacatttataatgaaggaactcggaacaggtcagaaccggctgtcagaaaaaaagatcaacgcaaggcagtgtatttctaaaaaaatagggaataagtatggtgtagataaaaggaggaatcacaatggcacttacaaacaccgaattgtctgaatggctgcaaaaacagatcggacaaacgcttgatatcagaaaaggagagctgacagacagccgaaacgagatttctgatatggatcagatcatgcttcaccttgatgacgttctcgtccgccggacaaaccatcccgatgactatgtagcggatgaagaactcgtcttaaaagggcacggcacaacctatacggaggaaggaaatgtcccgcttccccaagatgcgtatgaaattcctctgctcggcgacattaccatccaacaggagcaagacggattaaaggtacatacagatcgggccgtgtatacaatcgggacccggaaagagcaataaaaagaaaaaacgccgtgaaacagcggcgttttttattggtttttttcttcagaatatccgtggaacatcgtgaatgcgcaaagcataatgcctaaaataatgataatcgggagccagatcacggcaaacttataatccggttcggcaaaagcgcctatgaccgccccaaagcaatacagaaccaaggcaagcgcgcgcaatacagcatctctcgtaaactgcttccgcttgtccgctttgtaaaaccttgcggtgagatcttcaaaaaaattagcgagcgttcccgttaatacggtcgtggaaatccccgctacaccaagttttctcgcggctgtcgtctgcattcccattgcgaagctgagcagcataatcagcacataaacagaaatggcgtctgcaaaaaagcaggagaacaaagcaaacagcagcaaaacagctccttcaatagctaaagcggcagttaccgcagggggccagaatgatttctttttattgcccacaagcagggccgcggcaataacgccggcaataaatccgattaacgaggttaacgatttgagtacggcaaggtgccatgagttgccgatcgccaggccgaacagaacgatgttccccgtcatattggcggtaaagatatgtcccaggcttaaataaccgatcacatccacaattcccgctgttaaacaaagaagtaaaagtgcaatatttcggtatgtagtcactgtcaatgtgatccaatcctttctcatgctgattccaacatataagtttactctttgccatttcatatgtccagccggcgtgccgctttttcaaagcataaaaaaactccggcgaaccggagaagttactgaacgataaataatactctcgtgccgtcggaatagccgctcatttgatttccaacccatgaaccggccccgcggttatccgatggggttacatatctgatatcagcccccgccccgccttctgtgcagactgccatgggccattcatcacggtcaaacccgggctttgtcggaattcctttcaatgattctttccttctgttctccgctccgccccgatcaattgtacaaatctcagaatgacctgccgaaatggcgtcttttatatgatttcccgtctccggatattttgacagcgggaaatacagcacctgatcgtatcgggatgcagcatgagcagcactgtccgaatggatgccggcgcccgtaaggccgaactgaagagagatcaccaaaagcagacttgccgcccatttcataaacgcattcattcacatcctccttaagaagttgatatgaagcgtaaatatgtatattagccggatttaacacacatgatgaaatggcaaaaaaagtttgctgttttgttgataatcaacgaaaatggcggctttacgatttgtctattgaaccggcttctttttccttatatattttagacatacttatgagccgttgtgatcagtgtcttcggcagataaaaggaggaatgccgtccggtcggcaggcaccggctgttggttatgtcttttcaaaaacatgaaggcggggaaatccagatggaaaaaacaatgtttcacccacactcacccgagtttcacgaagacccttttgcggttttaagcagattcagagagcaggaccccatacataaattcgaactgcagcgtttcggaggcacctttccggcatggctcatcacgcgttatgatgattgtatggcgtttttaaaagacggcagaattacgagagatgtaaaacgggttatgccgaaggagctgatcgcgaagctgaatgtcagcgaagatatcgattttgtctcagagcatatgctggcaaaagaccctccggatcattcacgtcttcgatctttggtgcatcaggggttcactccccggatgattgagcagcttcgcaccgggatagagcagatcacagaagagctgctggatgaaatggaaacaaaagcagaccctgatatcatgaaagatttcgcggcaccgcttccgtttatcgtcatttccgagctgctcggaattccgaaagaggaccgcgccaaatttcaagtatggacaaacgcgatggtcgacacgtcagagagcggacaagatgcgaccaaccaggctctcaaagaatttaaacaatatatgaaaacactgatcgaagaaaaaagaaaacatcccgctgaagatctgacaagcaagcttatttacgctgaagaggacggccaaaagctgagtgaatcagagctgtattccatgctgtttttgttagtcgttgccgggcttgaaacaacggttaaccttctcggctccggcaccctggcgcttcttctgcacaaagaccagatggagaagataaagcgacagcccgaaaatatccagacggcggtcgaagagcttttgcgttacacctctcccgtcatcatgatggcgaatcgatgggcgattgaagatttcacctataaagatgtttctattaaaaaaggcgatatgatatttatcggcatcggttcagccaatcgggacccggaatatttcgatgatcctgatacattaaatatagcgagaacaccgaaccgtcatatctcttttggattcggcattcatttttgtctcggggctccgctcgcccggatggaagcatccattgcctttacttcgcttttaaaacggtttccgaatatagagctgaaaggcgcgcacgaggatgtaaagtggagaaaaaacgtgtttttgagagggcttgaaacattgcctgtcagattttaatatcgccccctgtttatcgggggttttttaatgtcttataaacaggaaatcaatataacagtgaatatttagtacatagtgtatttagttctattgtaaaaaaagcggccggattgctccggccgttctctattaccgttttaccaactcatttgtttcgtccagcttttttttgaaagatttaaggaaatttgcgcttatcgttcctttgtttgcgtacagtttttcgcagaatgccttaatggcgttttgcggctttggttccgacagcattgtgacatgattggaagagtggacgtccagcaggtgaaagtgtttcatctggtgttcccattctttccaatacgcatcatggtctaacggaatttgttcttcctctgctgtcagataacgttcaaaatctccgagaaacaaaccgcttttattacggaagtagtagcattgcagcgcttccggatgaggcagcggcttcatgtcatactcttccattccgtaagcgagctgcgtcttcatcatttgctccagctgcatccggatcgcttcttcggattttggcagaccgcgctttttggcaaggccgatcaattctttcaatacttcttcttcctcagcctggacggtaatgtcttctctgctgattaatgcctcttcaaggttttcaggcttaagatatgccgtaagcatcgtattgatcgtttgcagcatgactgacttaacagatggttttctctctttccatttttcactgtacggggtgtcgatcatgacggcgctttttactgtatgaccttcctcctgcaagaggcgcgcggtttcataagcaagcatcccgcccaaggaatatccgccgaggtcataagggcctttcggctgtaccgcttggatgattctcatataagaagcggccgtctcttcgattccttgcagcggctctttccctgtcaaacctcttgcctggatgccgtaaaaaggacgctgactctttttggcgaatggctggtatgcttcaacgcctcctgttccgccgtgaaaccaaaaaacaggacggcctttttctctttcattcagcttgacgagttcgggaaaattccggcccgcttcatgcggctggttcgtttttaacagcatgccgatctcctgaagagtgctgcatttctgaagagcttccagactgatgcggctgtctccgtcctcaagttttttcagcagctgaatagaggagattgaatcaaagccgtattcagtcagcggcttattttgatcaatttccgctgccttcatccccaaaatgtcagccacaatgtcagctgcgctctcgcggcggagctgagggtcctgggaaaccggcgcaagggtgatgtcttctggctgaccgccattccaatacttgtggtgttcaaaaggatatgtcggaagcggcactctttgaacagatttgccttggtggagtctgtcccacggtatatccgctcctttcacccagcaaaatgcaagcttttccagattgttttcagccaacagcgtctccgtgacgactgtaccgagagtcccttccagtaaaacgccgatatctcctgatccagtctgctgactgcctgtaaagaagcttttcattccattgctttcttcggaaaatgctctgtactctttcagtttttccagcaattcatcttgattgcgggcaacgagtgccaagcggcagttcatcgcctcacggccggtctgaagcgtataagcaatatcccgcagtgacggagtatctccagtttgcacaaaatcagccagctgacctgcggccgccttaagacgcccttcgctcttagcagaaagcacgataagctgcgggtcatgcgcagattctttgtctttatggctcggactgtactgttccaagacgacatgcgcattcatgccgccgaagccatagctgttaattgcggcccggcgcgggatcggtctgcccgtatggtcggtgagctgtgaccattcctgattgtcttcggtgaaacggaagcggcttttctgaataaccatttgctcatttgcagctgtaaatccgggaatgcccgggatggtatgatgcttcatggccatcgctacttttataagggcggccagtccggaagcgagttcgccgtgcccgatgcaaggtttcacggtgctgatataacaaggcgcgctttcctcttgatttgcagactcgccgtaacccgctttgattgcattaaactccagcgcatctgccatttcggaggcaatgccgtgcgcttcaatataagtgacggtttgcggatcaacatcggtgtcttcgtacgcttttttcatcgcggccttcattcccgccggattcggtgcgtgaagcgacatgcctttaccgccgtgagacactcctgttcctttaatgaccatgtgaatatgatcgccgtcttcaattgccgcctcaagcggtttgatgatgataacgcccgccccttcgcttctgacaaagccatcggcatctttttggaacgatttcgcccggccgtttttgcttaaatatcccatcgagtcaaaaccgataaaacctttcggcgattgcagaatattggcggcgcccacgacagcctgctcacattcgttatgatggattgattgaaccgccctgtgcaatgccaccagcgttgacgtgcaggcagcctcgtaatattcactcggtccttgtaaattcaaggcatatgatatcctgttcggaatgatggacggaatggctgttccattgttcggatcgctgttgcccgcggcaacgaaaacgcctgtcggtctgcttgataatgccttatttgtcaggcccgcatcctccattgccttccatgtatgcatcaaaagcagaaactgctccggccccatttgtgatgcctctttaggagaaattccgaaaaagagcgggtcaaattcgccgacaccgtcaataaaaccgccccatctgagactcgtgtcattctcatcgccggcgtaacggcgccagtcccagcggtccgccggaatttcggtaatacagtgatccccgtttacgatgtgtccccaaaaagactggatatccggggattgcggaaactgagctgacataccgataatcgcgattccttgcttgacatcggcgttttcacaaggcgtatgctgtttcttcggtaaagtgcgctcttctgtttccgtgaccccggcctcttctgaatgcctatgatcggcaagcaattgagaaaacttgctctcatatgctgacgcgaagtggcgggtcagctcctccgccgtcggatactcgaaaaacaatgttggattcacatcgatgtccgcctcttggccgatctcttttgtcagcccgatcagactcgctgaatcaagtcccaattccatgatattcgcgtcagaacgaagagatgacgcgggttcatccatcatcttggcgagcttgccaaggacgtagctgcggatatcatctgtcagactgccggcagaaatcggtgctcccgcattcttaacagccgttcgggccggctgattcatctgttcggttttcgggcggaaccgtttcagggcatagccttcaaaacgcatcaccacttccgatcggctgctgatgacatctgcgttaatcagaatcatttcccccgtttgtttagccagcttgatgtgcagccagcaatcggtaagattttccgggctgctgaaggtgacggaattaatgccgaacggcagatagctttccgtctctgtttggtccaataaagaaagcgaggccaagtaagcactgttggcgattaatggatttatggcataatgatgcgcttgttgtgagtcgctattgttcaggttcactttcgctaaaacggcatcagtgcctttgtacagacgggtgatcgttttaaattcttctccccacacgacggttcccgttccatctccgtataactcatctatccggcccacttcccggtaagagcgctgaatggccgccagatctgcgtgctgcttttgaaacggatacgggctgcactcggcatacgccgctatgctccaatcaggagacgtgcggctgcggtgcattatgctcagttcaaatccatccccgttttgtttcgattctgttttcagctcgatgtgatcgcctttttttacggtaatggggctgacgtaattcagttttttaatatgtcctccttccgcttcaggaaaaaggtcacaaaaatgatcgactgccagactgttatatgtagcgccgacgagtaccggttctccgccgaattgatgccctttcacgtatgggtcgtcatcactgtataccgcctgaacgccggcagcgttttctgattcaccgaaatgaaaagaagtcccgtggtcaaaagcgtaggccggcagatgaacggcgtgctcttgctgcaactgatcaaacgtgatattctctcctttttcccattgccgcgcacgccggccgatatcagaatcggagaaattgagattccgctgatccatgcggtaagcggccagtttttccagcagttcctgaacggaagcagccgtaaatgccgcccgatactccggatgatgcgttcttttttgcagcgcagatgcgatggcggccggatgaagagatggcgtcttttctaaaaaggccgccagtctctcaagataggcttcaaaactccattttgttttcgctgacacagggaaaatatattcctcatcgccgtgacgggcctgatcggaattcgggctgatatattcttctacgatgagatttgcatatgccccgcctgccccgaaggaattgatcatgcttctccgcggtacgatgtctcccgtctcggcatccttcagacgctcccaatactcggttttctcctgcaggtaaaaggccgtttgttcaagcgcgatattcggattttgcggttttgcgttaatggtcggaactaatgtttcccgctccatttgcagcagcactttcgcgagctgggacatcccggaggccgcctctaaatggccgagatttgacttgacggatccaagcgcgcaaaatcgttttttatcggtatattgcgagaacgcgttcgtcagggcaatgacctcaatcggatctcccaatacagagccgtttgccgctgattcaacataactgattgtttccggattgattccggctttgtcaatggaagccgccatgagcttcgcctgctgtttcggatccggagccgtgtacatctgccttccgccgctatggcacaacgcgctgcttttaatgaccccgtaaatatggtctttgtcggcaaccgctttggagagcggcttcaagagcaccgcaccgactccttctcccggcatcagccccgtgccggttccgaagcttttgctttcacttccctgttcaagcaaattcgcccgttcgagcgcatcatatttagacggttcaagcgtgagattgacccccccggcaatcgccatggaacagctgttaagcttcaggctttcacaggcgagatgaatggcgctcagtgagctggagcatgcggtcgtaacgcccatgctcgggcccgttaaattgaaaaagtgggaaatgcggttggcgatatgccaatcccctccgttagagctgagcgcagctttttccaatgacgggatattccagaaatattgattgtacatactgcccataaatacaccgattccgctgtctgattcctgccattcgtttactctctctaacgagtagccgccgttttcaaatgtttcccatacggtttcaaggcttagacggagctcaggtgtcatctccatcacatggtcttcccggatgtcaaacaagtgatggtcaaaagcgtcaatatgctgcagaaatccgccgtaccgtgttttgcgttcttcttttcgtgtttcttttgccatcgttttcagaagaccggacttccatctgttttccggagcttccgtaatacagctgtctccggcttttaaatgctcccacagctcatcgagggtttcagactcgggatagcggccgctgatgccgataatggcaatgtcgtcacgatctgagcgattatcggtgacggtttctgtttccggctttggcgcttttggctctttttgttcagtgataaatcgccgcgtttccgtgacaagcggcaccggttcattcattgcaggttccggatgctccgtttcaggaggcgcttgatcggctccgaatgcctgttgcagcttatccgggtaagtttccagcaaatactcggcaagttctttcgtattcgtgtgttcaaataagaccgttttcggcagctcgcccgtcaatgtttccagttcacggataaaattcacctgcaaaatggagtcgatgccgtatttttcaaagctggtttccggctgaatgcgctcgggagcaagctttatggacttggctaacgtttcttttatgaattgcaccgtccggtctgtgactgagaaagacggttctgtgaaatcagccggctctttggaagccgcaatttcttcaaccgccggcgcgtccggctgcttttgcctgatgacgccgtcgctttctgctgccacgatctgctggccgaggtgatgtgacgattccgccataaatgtaacgtaccgatatccctcgctttccagcgcagactgccacgcttcaggatacagcccagggcatccgggaatacgcagtttggcgtcttcatacagccaccagccttccaaaagaccgaatgtcagatgagaataaaccgaatggctgctgatctcatttaatagcaaaatcccattctttttaagcaccgctttggcattgcgaagtgtccgccgaatattttttgtcgcgtgaagcacatttgccgcaattaccgcgtcatatgcacccgcctctataccctgcaaagccgggggctcttccacattaaaccgcttataagtcaaatacggattgtcgggaccgtattctttttcagcatgcatgaaaaaggcctttgacagatcggtgtagcaatattctttcacatgatgtttgacctcttttaatcttttgaaaacggccgcgctcgtcccgcccgtccccgctccgatctctaatatccggatttccgcgttcgggtcttctttcaggcgttcttcaatgaaagccgtcaatgtgtcagcgagcacctcattaaagtagtctgccgtttcattgtttttatagattccttcaaccaattccattgaggaatcaggaaacagaacatcagtggcagaaactctgccggataaaatatccggcaaagctctgagagcggtctccactaaggtgatcatcgcccgtttgctgctgtccttgagtaaaggagctttcttttcatcccattcttgccacagaacgtccgcacgctctatcggacccgttaacacatacgtactgccagactgtttcaaaaagcctttttgcaccaagatggagatgctttcttccagccacctgccgtaaaacccctgcataacaggctgcgtttcgttttccgtaaaaaatccgacagatttcagctggcctgccaatagtttgtaaagaagatcttcagtgttttgcaaagccgtcccctccttaactcaattgttgtacatgtcttgttactttaggctgatagcttcgcagtttttgcatcgccgagccgtgatgttcagggtatacttctatcatttcttccggtttttcctccggctcttccgcctgtttcatcatgacgaactgattcaatgggccgccgagcaatcgttcaagcgccgccattgcttccggcgcttcaattgatccgactcccgcctgtttcatccgttcttgatattcggcagatgatacgattccgacactgccccagtagctccaattcatcactgccgccgaatacggccgaacttgagccaaatgagcggcaaaggcatctttgaaactgcacccggcagcataattgctttgtccggccgctcgcgcaaatgattgaacggatgagaagaacaaagcaaagtccagcggctcattttggaacacgagggccatattcacgctgacattgacttttgcagcgagcacgcttctcaaacggctttccggcatattcgccaggctctgatcctctaaaacaattgcggaatggatgattccgttaatttgcgggtgcgtgcgtttgatcgtttcatacgcccgtgtgagctcatccgggtttgccgcgtcagcttcaatataaatcggcgccggcccgaattggctgagtctgtcgattttttcctggatggcgctgttatgttttcgtctgccgatccaaacgactcgcgcctgatacgttttcacggcatattcgctccatgcttcgccgatgccccccgcgccgccaatgacgacataaacgccgcctttttggtaagcgggccggcttgacaccggctgctgtacagggatgaggcgctgtttgtaccagtgattgttgcggtacgcccatgtattgccttgctcatcaaacggcgctgagaacagctccgcctttgaaacatcttccggacatccggcatcaatcagccgtgtttgccagttcggatactcttttgcgagcgaaccgatcaaaccgtgaatgcctgcatgagccggatcaatgatgtccgccggctgtacggactgtgtttttattgtgactgcagtcaagctgattcgcttgcttccgtatcctaaagcaagcatcgctttaatcactctgtacatctggatgacgcccgcatcttgagctttcaccatgtcaccatcgctgtgaaaaggagcgatccatacgatatgcccgaaagaccctcttgctttcagttcagccgcaacagcctctatttcatcctccgggttgatatgaagccgtttcgcagaaggatgatgcaattgaaaagcctcgctttcctcatcccctgcgataaagacaacctcttccgtcttatatgccgggctttggtcacggaattccgcaagatcccataccggagccagaaggtttgctccatttaatgatgtttccggcgccggtccttccatcattctggaagaaatccctttaatcctgacacagacgcggcctgtctcatcgcataagtcaatgtccagccgctgtattttttcatccgttccccgggagctgacatacgcccacatgctggtcgtgcacgggctgaaaatgtccagttcctcaagggcgaacggcagtgacagctggttatcatctgcatgcagcttcagtccgattgtcgcttgcagagctgaatcaagcatacacgggtgaagaacgtattgatctgctgtttcttcgaggaaggaaggcagacggagctcagctaatgcttgattgcttccgatatgaatgtgctgaattccttgttgtccgggaccgtagtcaatgccgattttgttgaataagccgtaacactgttcagaagtcagcatgctgaggccgcattgagctttcagtgcgcctatatcacggtgcggagcctccccggcgccgagaatgccggcagccccctgacagtgtatctgcctgccgcttgcttctgtttgtgaatccgtgtaaatgtcatacacgatttcaccgtttcccctcgggttcaggctgatttgcgcttcaatcgggcggttttccgcttcgatcggccgaacccaaacgatgtttttcagacggatgacagacggaacttccttttgccctttgactgcctgagcaaccgccgccctggccatttccaagtaggcgacgcccggcatgaccggcttgcctttaataagatgatcggtgaaaatcgtctcttgtcccgtaaattcggatcggtaccgctgctctgttaaatccgatacattctcgtgtagcagcgggtgcagcacccgcgccgtcggcacagcttgcggtttttctgctttcggccggttgtccgtgatccagtaccgctctttcgcaaacgggtaagcaggaagactcatccgttggggcttgatatcagaatataagccgtcccatttgatatccgcgccctgcacccataattccgcaagcttgtcattctcccggcggcttatcagctcttcgatatccgcttcgccgtttgcgcctgccataatggatttcagcgggattttacccgcttttcctttataaatgcccgctttgtcataacgtcctttcgcacagctctttagcttgtcccgcagttcttcggccgaggaagcgataatggccgctctttcttccatcgcatcacgcccctgctgaagcgtgtaagcaacatcggcaagatccgcatccgtaaaagaagcttgcgccagctgctgcgcctgttcctgcagacgttcttcttctttggccgacagcacaaagatttgagggtgtgtgaaaacagctgtttttctttcttccttcgggatatattcttcaatgacgacatgggcgtttacgccgccgatgccgaaagaactgattcccgcacggcgcggcagatgattgccgttttcgtctttcaatgctgtccattctcttttttcctgtacgatgtaaaacggactgtctttcagtttgatatacgggttgatgacctcgctgtggaggctttttgcaagtgttttatgcttcatctgcatcagcactttgatcacacccgcgacaccggctgccagtgacaggtggccgatattggtttttgccgatcccaaaccgcagtgactcgcgtaaacggcgggatcgcctgttttttcgtacagcttttgaaaggcggatttcaggccgttgatttcgaccggatcgccaagctccgttccggttccgtgcgcttctatataagtgacggttctcggatcaatgcccgctttgtcataagccgttctgacgacttccgcctgggctttcggattcggtgtcgtcaaggagttcgcacgtccgccgtggttgaccgcgctgcctttaatgacgccgtaaatatgatcgcctgatttttccgcttctgacagctttttcaaaaacagaattccggcaccttcactgacggcaaatccgtccgccctgtcggagaacgttttgcatttcccttctttgctcagcgcacccgctttatcataagcgatgtggccttgcggtgtgacgacggtattcacgccgccggcgatcgccatctcgcagttcccgttttcaatggcgcatacggcgtgatgaatcgcgaccagcgagctggaacaagccgtgtcgatcggttcactcggcccgtgcagattgagcatatagctgacgcggttcggccctgctgacggactcatatttgcggctgacgcaccgccgatatccaggtcggaaaacagtgagccgtacccggtatttcccgtgccgatatacaggcctgttttcgtgccggaaaggcttttagtggaatatcccgcatcttctatcgccttccacgcatacatcattaacaagcgctgctggggatccatctgttcggcttccagcggtgaaattccgaagaacagcggatcaaattccgcaactccgtcaataaatccgccccactttacatttgttttgttggcttcgttaagcgggtcaccgtaatactcctgccagtcccagcgatccgccggcacctctgttatacaatcttttccctcttctaaattgcgccaatactcatcaatatttgcggccttcggaaacactccgctcatgccgacaatggcgatcggttccggtttatgttcagccgcagtctgaacatgctgtacggctgtttttgcaaatcgtttgttccctgccagtctgatgccgccatcatctgttacaccgcttttcttttcttctttcggctgtgtgctgccggcaaattgcgtttgatagtcttctgctaaatgatgcgccaaggcttgaatcgtcgcatattcaaaaaatacggtcggtgtcagatcaagctgataagtgtcattcagcttgttggcgaattccgtcagcgtaatggaatcaaatccgtattgattgaactccaattcgatatcgatttcttcaatgtttattttcagaagcccggaaacttcttttgccagcaattcctgaagtttggccgtcaggtctttcggcgcaggtgtttcttccgttttcttaatcggtgcaaaagcggatgcgggagtcttttgaagcagtttttcccgcattacggcgcggtttccttctataacgagcacgcttgttttccccgtgctccatgctttgtaaagagcttctattccggtttcagtgcgcatcggcgttacaccggttcttttttcggtgagcttcgccatttcttcattgacttgcattccgccgtctttccaaagcggccaattgattgacaatgtgtgaccgtggcggtacattgccgtaaccagcgcgttgcggtatgccgcatagctgtccataaatgcgtttgccgccgcataatccgcctgtcccgcattcccggtgacaccggaaatggatgagaaaacgatgaaaaagtccagcgctaaatgctcggttgcttcatcaaggttgacaaatccgtccgttttaggagccaatacactgtaaaactcttcggttgttttctttacgatatattgatctttcatcacacccgcgctatgaatgatgccgtgaaggccgccatattccgtttcaattgttttgaccaggtctgccgcagttagagcgtttgttacgtcagcctgtttgtattccgcttttgctccgagtgattcaagcgatttcagctgcatccgctgattctcgcttaatgcggaacggcctgtcaaaaccagcgtcggctctttgactttccgggcgatttctttcgcgaaaataaagccgaggcccccggctcctccggtaatgagataaatccctccgtcgttccacggaatgcgtattttgccgccggacacggccgtttctttgacatctgcgctgtatcggatgccgtttttatatttgatatggctgtcatcagcccttgttttattttctctgatgatgtctgtgattctgccgttttccgctggttctatttcaatcagctgggttttcagttttttatgttccaggccggctgtttttagcagagctgaaatccctgagagcagctgatgcttatctgttttagagagaaccgtctggataaggacgtctccttccgtctcttccttcagcagtttttgcagcgtctccaatatccgtcctgtataatcacggaagcgcgccgccgctttcccgtgcagggaggtcatttcaatacattcagctcccgcggcttcaaccgcttgttttagtccggcgtctgtgtcacaaagcattacgatatgccgggcaaaaaccggttccgtttgagcagcagtttcatcgcttcgtgtccataccggctcaagcatgagcgtttccggagctttttcttttttctcaggttctttttcagccgttctgaatgacaaacctttcagccttacgcaaaccttgccattttcatcacaaatatcaagatcgcgtttttcaacatgtccggctttgtggtcttcagaaagtctggcgtaaacccacatctcggcagcgcatgcgctgaatacttcaagctcctgaaccgcaaacggaagcatcagttgttcatcatttgttccggttaatatgcttgatgcctgcaatgcagagtccattaagcccggatgcatgacatactcctgtaccgtgtccgcacaagccgcatcaagagacagtctgcccaatacgaaatcatcacctgtataaatcgctttgacaccccggaaagccgggccgtaatcaaaaccgattttgcggtacatatcgtacacttcatctgcagaaaacggtgtctcggcggattgtgatctcagtttttggagatcaatgaccggagcctttgcgtcagggcggactgatactgccccttggctgtaaacggacggctgatctgtttcccggccgcagtaaatgtcgaattgaacgtcatttgccgtttcgggaatgagacggatgttgacatgaaccggctcgtcttcaatggtaatcggccgcacccaaaccgtattcttaagctggacgcttccttgtccggccggaacttcagatgcctgttccattgctgcgcgcgccatttcaagatgtgccacacccggtaaaatcggcacgccttttacaacatgatccgcaaggtaaaattcttctcctgtatagattgagctgaaccgctgttctgcaaggtttgaagtatttctgtgcagaagcggatgaagcgcgtcttgttttccggcagatacagtgcttgttttttcgtgttttccggtgtgtttcgccgcccaatagcggtcttttgcaaaaggatacgacggcaggctcatgcgtttaggcggccggtctccatacagcttcgcccaatcgacgttcagccctttgacccataattcaagcagcttcgcgtatttgccgcgtgccatccatttttcaacggcttcttgaatttcttcatcttccgtcagcatttgcagcgtgcctttgtctattcttcctctgtacaaatccgcatgcttatctccagtgataaactgtgacagtttttcctgcagttcttctgcggatccggcaataaccgccaggcgttcttccatggcgtcccttccgatttggagagtatatgccatagaaacgaggctggaatgatcgtaccgtttttcagtaagcgcacgtttcagctgttttgcctgctctttcaggcgtttttcatttttggcggacagaacgaaaagacatgggtcgatatgagaatcatctgcttcctctctgtcttctggaatgtattcttcgatgacgacgtgggcatttacgcctccgatgccgaatgagctgatgcccgcgcggcgcggctgttcgtttccgcgttcgtccgtctgcgtcttccattccatcgtctcccgcaccagataaaacgggctgtcttcaagctgaatatacggatttaccgtctcacagtggagacttttgactaatgtgcgatgcttcatctgcagcaaaattttaataatgcccgctgctcccgcggcaagggataaatggccgatattcgttttgaccgaccctaagccgcaatagccggccgctttctcttttccgtctgcaaacgagctgaacgcttgtttcaggccgttaatttcaacgggatcccccaattctgttccggtgccgtgcgcttcgatataagagactgttttcggatcaatgcccgcttttttatatgcggctttaataacttccgcctgttgtttcgggttaggcgttgttaaagatgccgcacggccgccgtgattcaccgcgcttcctttaatgacgccgtaaatatggtccccatccgcctcagcggctttcagctttttgaggaaaaagagcccggctccttcaccatgggcaaaaccgtcagcctgatcggagaacgtcttgcatcttccttctttactcagcgcgcccgctttgtcaaagctgatatacacatccggaagaacaatcgtattgattcctcccgccaaagccatgtcgcacgtcccttcttcaattgaagaaacggcatggtgtatggcaacgagtgagcttgagcaggcggtatcaatcggctcgctcggcccgtgcagattgagcgtatagctgacacggttcggtccgacagacggacttgtattcgccgcggatgacccttcaatcgccgcatcggcattggctaaaagagaaccgtagccggtgtttccggtcccgataaacacacctgtctttgtgcctgagagactctttgacgcatatccggcatcttcaatcgctttccacgcatacgtcagcaagaggcgctgctgagggtccatttgctccgcttcccgcggtgaaatcccgaaaaacaacggatcaaattcagcaattccgtcaataaacccgccttggttgacgtttgttttattggcttcttttgcgggatccccgtaatagtcccgccagtcccagcggtctttcggaatctcggtcatgcagtctttgccttctttcaggttctgccagaaagcttcaatgtcttctgccatcgggaaaatcccgctgatgcctacgattgcgatcggttccggcccttggtcccgctgcactgtctgcggaagtgtctcaggcagagtgcggcgtcgcttaacggccgggcgcgtaatttgagtctcttttaccggtcttgccgattgaatcgtttttgtatttaccgcaaaccgtccggcaaattcctcttcgtattcactgattaaatgaacggcaaattcatggattgtcggatgatcaaagaaaatcgtcggcgttaacgtaagccggtacgttttgtttaactggttcgtaaactcagtcatcgagatagaatccagcccgtattttgtcatttcttcatgaggatcaattttgtcaatgtttacttttaacagcgaggccgtctgctgttttaacagatgcttcactttttcaagcaggctgtcagcatcaatgtcatgacgtacgccgatctctgcttccggatgatcattctctttgcggaaccgttttgctttcatgtgtttcacatctccttcaaaaaccgtcatccgggctgtcccgctcatcaagccttgatataaagccttgatgccggcatctgtgctgagcggtgcgattcccgcctgctgcatcagcatatcttccgtctgctttcctgcctgcattccgccttctttccataacggccagctgacagaaagcgtctttccgtatctttgtcctgcggcttgtaaagaacggcggtactcggcatacatctccataaaaacatttgcagacgcataatcagcctggccgacgcttccaagcacacctgataaggatgagaagacaataaagacatctaatttctcatgttgtgacgcttcatcaagatacacaaggcccttcactttcggagcgagaacgtgttggaattcctctgccgtcttcttcaccatgtagttgtcttttataatgccggcactgtgaacaatcccgtccagcttgccgtgccgtttacggatattgcggatcaatcggtatacttctgcttcgtccgtgacatcggtctgctcgtagaaaacagaagcgccggcagcacgtactgtttccagcatgtctttctgcttttctccgagagcggaccggccggttagtatgatgacggcgtcttttgtacggtttgcgatctcttttgcaaaaatcagacctaaacctccggcacctcctgtaatgagataaacgccttcgtctttccacggaatgtccggctccgcttgagaaatatccatctcttcccaatcagcggcaatgcgcttgccgttttcatatttcacatggacgctttcggcatgcatacggttttccgccgctttttccgcgatgccttcagcactttctttctcctcgacttcgatcatttgacagatcagcttggaatgttcaagacatgcggttttgaagaggccggtaatgcctgagaacacctgctgtaagcctgctgaccgcgtaacagcctgaaaaagaacgcggcccttcggcttgcttttcattatggttttgatatggccaaacagctgacccgcataagaatgataccgctctgcaatagatgcgggacgatcgtccaggataatgacgcgtgcatgttcaagctttgcttcgacagcttgtttaacggcttcatcgtactcacaaaggaaaatgatatgctcttcatacgaaggcgcatgatcggccggtgccgtctgctctttccagaccggttcagcgaacaatgtgtccgtacggctgaccgaaacgccggcacccgcgttttcttccatgatccgcgttgagaaacctctcatccgcacacaaagccagccgttattgtcatataaatcaatatctgctttttggataggatcgccggctttattgttcgcactgaatgtgacgtgcacccacatatcatcagcgcacggattcagaacgtccagctcctctaaagcaaacggcaatgcggctttgaatggttccccgctttctgccagcagcgctctcgtcacgttttgcaaatattcggcggcctgaagcgcaccgtccatcatactcggatgaaggatataatcagctttcgtatgggagagggattcaggaagcttcaatttagcaagcagccggtcttcgcctttgtatacaagctggacacctttatagccaggcccgtaatcagctccgatcattcctttgtaaaacgcttgagattcgattgttccctgcgtgcaccggcgcttcagctgctcaatatccgccgcttcctccggttccttccggatgatttcagcgatgccctgattataaagaggagcttcttcaccgatagaatcgttaccgccgtacattctgtattgaatctgtccgtccccttcttcataaagtccgatatggacacggacagcgtcctgatcgactatcaccgggcggacccatacgatattctttaagcgcaggccgagagaatcctctgttgccccgccgatgcttttctccgccgcggcccgtgccatctcaagggtgacggcagccggcacgatcgccattcctttaatgatatgctcggcaataaaatactcttttcccgtaaattccgaactgaaccgctgctcctgcaagacggatgtattctgatgtaccagcggatgcaaaaacttcgcatctgtttgcttcacagtttcttccggccagaagcgctcctctgcgaacgggtaggtcggcgcactgattcttcgcggcgcggaatcctgatacaataagccccaatcaacacgcgctccttcaatccagagcgccgcaagtgctttcagcttttcatcacgtgtctgacatgccgcaagctcttccatctcctgagccgacacttctctgcttctcactttttcgccccgtaagatgttttggtcattgccgttgatgaaatcctgcagctgacgcttcagatcgtgacgatcatgactgataaaaacggctctctcttccatcgcttcacgtccggtctgatacgtaaatgccagatcatgcaaggaaacatcgttttcggcttcatccagaaagccggataaacaagttgcataggcagtaagacgttgcttatttctcgctgacagcggaacgatataaggcggctgtccgtcatttgatccgctgatcgttttgttttcatactgttcaaaaatggcgtgtgcgtttgttcctccgagtccgaatgagcttaacgctgcccggtgcggcgtctctctctccggaagcgattttctcttatccgccacataaaacggcgaaccgctgaatttgatattcggattcggtgacgtgtaattaatggtaggcgccagctcccgatgatataaactcatggcgactttgatgcacccggccagacccgctgctgtatccaaatgcccgatattcgtttttacggagccgattccgcaatactgctcccggtccgtgtaacgtttatacacttgctgcagcgcggacatttcaatcggatcacccaatgtcgttcctgtgccgtgcgcttcgatataggaaatcgtctccgggtgaatattcgtgctgtctaaaacatgctggatgacgtcagtctgaccttttacactcggtgcgtaaaaaccgactttatccgctccgtcattgttcagaccgatgcctctgagcatggcgtatatgtgatctccgtcctgaacggcttgcgacgcctttttcagcagaatgacggcagctccttctccgcccgccataccgtcggctgaagcgtcaaatgccttgacatgcccgtcgcttgaaaaattcaatccgttttggtgcacatagccgatgcttgtcgctgcatgcagcgttgctccgccgacgagcgcgtattccgattctccgctcgtgatgcttttataggctgaataaagaccgactaatgatgatgagcaattggaatgaacgaaatagcttggcccttttaatccgagcttatgggaaaccatcgtcggaatcgtgccgctctgcgctaacacccatgagacatagccgtcaggagattcatggccttctgtcgttttttccggtaaaagcgaccgatacgaattattgcttgccgacatatatacgcttgtcttcggaatctctttggatacatatcccgcgtcctcgacggctttccaagaatgtagcagcagaagccgaagctgaggatccataaattctgcgtctttcggagaaatgtgaaagaactcagggtcaaagagatcttttccttctatcgtcgataatgccggcacatagtcgggattttcgatcaaatcttcaggtacgccggcttcccgaagttcttcttccgagtagaaccggacgctttcctttccttctcttaactgcttccaaaactcatgatgatttttcgcgccggggaactggcaggaaatccccactatcgccacactgtcgtcaaagtaagacggcaccccgttttgcggtgtttgttctctttctctctcatcttggcctgatgcctctgattcagccgcctgtttagtttcaacaataaatcggctgatcgcctgaatggtagagtgttcgaataaatccgtgacggtaaaatcgcattccagctcctgtttaatgcgttctgccgccgcaacagccaaaagcgagtcgcctcccacatcgaaaaagccgtcttcggttttgatgcccgccgtattcagcaggtcttcccatattgcggtcactttcgcttccgcttctgataacggcagtctgcccgtcttttcagaccggtgaacaattaccttgcgctgttttaggtctttgcggttcacttttccgctcggtgttaacggcagcgcatccagacggataaaatgggcaggcgccatataatccggcagactcgataaaagatggttgcggagcgctttttcatctgccgtatgaccggagcgggccgtataataagcaatcagctttttatgtccgttcttttcctgaacaacaaccgcctgatcaagaatgtccggatgttcgttcaatttcgtttcaatcgctcccaattcgatgcggaagccgcgaattttcacctgactgtcaatccggccagcatattctatatttccgtcaggcagccatctggccaaatcacctgtcttgtaaagcttttctccttcactaaacggattatcaataaatgatgccgccgtcagctcaggctgattgtaatagcctctggccagaccggcgccggccacgcaaagctcgccggccacaccgtcagggacggggctgagcttttcatcgacaatataaagccgtgtattttgaatcggtttcccgatcggcgtattcctgcttgtgatttccttttggccgcagctgtagtaagcggcataaatagatgtttccgtcgggccgtatatgttttcaattctggcatgtttgaagatggaaacggccttttttactaaatctttcggaaatgcctcaccggccaccatcacatatttcacagggccgtcttctgtaaatgccgtatgccgctttaccgtttccagaaatacattaaacacggcgggagcaaaattcagatgcgtgacctggtgggtttggatgtattccatacaaagctgcgggtttttttctgcaccaggcggcaaaatgacaagccgtccgtttccgataaaccagccgaataattcagaaatcgaaacgtcaaatacgtaattcgtttttaacaaataggcatcctcttgcgcgaccggatactcagcttccaaaaactgcagcgtattcatgatggccctgtgctcaaccatgacgcctttcggttttcccgtgcttccggacgtatatagaatataagcgagatgatgcggttttgaacgcggcgtcagttttgccccgctgacagaacgtccgctcttttcaatttccaccgtgctcacaccgccgacggccaactgttcaatcatgccgcgcgtatttgcttgcgttaatacgattgaaacgccgctgtcagtcaacacgtgcgccatccgttcgtttggaaaagccgggtccagcggcacatacgcgcctcccgcttttaaaatggcgaggatgccgatgaccatctcaaaagaacgctccgtacaaatgccgaccgggcattccggtgtgacgcccttttcttgcaggtacacggcgagcgccgtgcttcgttcatctaattcgcgatatgtaagactgttttcaccgtatgtgacggcttctctgtcagggtggcgtccggctttttccgcaaacacttcatgaatgcagcgctcattcggctgatgagatcggcttgcttcacgtttttgattgagcaggccggaacaggcttcaaaagcgatctccggatcagaaagcaccttttctgccagtttcatataatgctccgccatccgttcgatgaaagaagggctgtagacatccgggttgtacagaaattgcaggacggttcccgtttcttttttatagacttcaagcgcaagctcaaattcgccttcctgatgaatgtcttctatcatttcaatgccgagtgattgatatagttccgccagcttttccgctccttctgtccggaagaagttttgatagaaaaacgcggtttgaaaaacaggcgaaaccgcaggcgagcgttccgtcttcaattctttgacaagcgcgggaaacggatacgcggcatggtccagcccttctgccagtgtcagctgcagctccttcaaaaacgccgtaaaggatttggcgcccgtctccctgcttctgaccgcgatcatattaataaagtatccgatgacagattcaaattgagcctcagagcgccccatcgtcggcatgccgacgatgacatcttcctgattcgtatattgatagagcagccctttgaaaatagcgagatacacaacggattcattgacattatgtttttgggcgcacactttaatctgccggttcagttcatcaggaagcaagcgctgatacgcctgccctttgcaagtttgaaccgatgatctcggataatccgacggaagctcaagcaccggcagcggtccttccagctgctttttccaataagagagatgcgtttttcccgcttcgctttccagcagctctttttcccatttcacaaagtcatgataatctgcggcctgctgaaccatgacaggttctttgccttcacttgcttttacataagcgtccagcagcgccgacataaacgtcataagagagacgccgtcaaaaataatatggtgaatggtgattaacacaatcggctcccgcttcgcccgccggaatacatgaacacgcaggagcggcccggtttcaagcgcgaacggttcttttgctttttctttaataaacgaaagagcgtcacgcccgcttaattcagaaagatccatttcttcaatcggaaaatgccgatccgtatcttctatctgatacggaaggccgttttcctcttttatcacactggtcaaaatagggtgctggcgctgcacggacaaaagggcgtttttgaatgtctcgatatccagcttttgaaaacgaaagcataacggaatgttatatgcgctcatctccggaaacattttctgaagcatccacaaacctttctggccttcagaaagcggacgttttgcagttgtccgcttgaaagcctgaagcttttgttctacttcagcgatggtgagcgttcctgatctgtaggcatcgagaagttctttatgattcataagtcttactcccttctatgatgtcttgcactcttttaaaatctaatgtcccctcagagacctgtttcatcatggcgatgatctcctgatccgtgtactccttgttacccggagcggcggcttttgtttcagtttcttccgttcggtaaaacgttttgatcgtttctttgtgttctgtcaggtaatagctgatgacgtctccgagcgtggcatagctgtaaaataaagccggagtgacttcaatgccgtaatgactcgacaaaagagcggcaaatttggctaaatagatggaatcaaatccgaattccgcccagtttttatgcaggacgagtttatctttagatattttcagcagactgtgtatcagctctttcaaatccgcttcgagccgtttttccgtgctttcttccgggatgcggcggctcacggtttccaaaagcgcatccggttttgatgaatcgtcccgccgtatgcctaaaaatcgttcggcgcggcttcttttgccggcaatgacaaggcactgggtgttgtcttgagaaatgatgcgctcaaacagctcaatgccttcatctgtttctaacaggcgctgtccgcttgattgcaggtacatgcccgtcgtctcttcaccgccgacggccattccgccgtttttccagaccggccagtttatgacaaaagcgtttccgctttcggattgttcgtttttatagcgggcatacgccatttggaacctgttcgcgaccgcgtaatcacagcatccaaaatctcctaaaacagcagatgtggatgaaaagtagcagatgaaatcaggcgtttcgtttttcagccactcgtcaagaagcaggctcccgtttattttcggttcaagcgtactgcggaaattcctgatttcattttcaaagacggatgttctgctttcgatgcccgccgcatgaatgacgccgtgaatagctccgaatcgttctttcgcgcgcttgatgcagtcgcccattccgatcggatcacaaacatcggcttcggcgtaaagaacacccgcgccgagattttccaggtctttcattttttctttcttttcttcattgatcggcgaccgccccgtgagaatgacatttgcctggtagttccgggcgagatggcgggcaaataagtagccgagccctcctaatccgcctgtaatgagatatgttccgccggttctgatcctgccgttttctttcgttagtccggttggttcggtgtgatagacatatcgttttccctcttccaagaaaacggtatggtctgtttcagctttcagctcgtcccaaatggttctcatccagtccgttatggccgcgccggcttttcggaagtggccggtaacacttgttttcggaagaacaatgccgagcgaacgctcaaagccgatccatgattccaagtagcacctttccagaccggatgcatattcccccgccaataacagcctttccggctgcagaccggtctcagccattgctttgagaatatggacaatacatgaataatcttcgatgcagcttttatcttcaagcgcccataaatacaaaatggcagaagcttcaccgtactctttttgaatatccgcaaaagcgttcacatatgattgcggatcttcccgcaccacttggcagcggccggcggacaaggcctcataccggtctccctgagcgataaaaataacgtcaatgtcactgtcatacgatttgatcacagagacggcttcctgctgcttcttctgatcagttaagaaagaaatcaccgttttgacttgcttttctccggcagccggcagagcctgttctttaagaacttctctaaaagccattacttcaaactgctccgccggatcactttcatcagccggcgccttaacgggcgcggccttgctttgtacaggctgctgatgccagaagcgttctttcgcaaacggataagcaggcaggctgatgcgggccggaggacggtctccgtataatttcgcccaattgatgtccaatccttttacccaaagctcaagcagcttagaatatttccgtttgctgatccaagcgtctatgatggtttccatgtcatcatcggccgcaaatacggcaagcatccgtttgttttcttccgtgccgtcacggtgcagtccggcgctgttttgtccggcgataaatccgttcagtttttcctcaagttcatgaagtgaatggacgataaaaccgagacgctcttccatcggcacccggccagtctggagagtaaaggctatgctcataagatcgcggccgctgtatcttttttcacggatggcgtctctgagctgttttgctttttcagtgagccgttcgctgtttttcgcggacaggacgatgatggcgggctgatctgccggcgtctcatcaggctctttgtctgccgtatattcttctatgatgaggtgggcgtttgctcctcccgcgccgaagctgcttaaccccgcccttctcggaagctctttgccgccgatgacgggacgtttccactcaccgagctcctgctgaacggcaaacggcgtatacgcgaaatcaatatttgggttcagctgttccgcgtgcagggacggcgcaatttggcggtctttgagctggaataatatttttgtcagacccgcaatgcccgctgcgctttcgcaatggccgatatttgattttgctgagccgatggcgcaaaactgtttgtctgttgtatcctcatcaaatgctttcgttaatccggcgatttcaatcggatcccctaatgcggtccccgtgccgtgggcttcaatataactgacggtgcgcgccgggacgtttgccctttcgaaagcttcttttattaaggcggcctgcgcattcggattcggaacggtgtatccgttcgttttgcctccgctgttaatggcgcttcctttaatcacaccgtaaatgtgatcgttgtcggcaatcgcttgctccaacggctttaatacgaccgcgcccaccccttctccgtctacaaaaccgtccgcgcggtctccgaacgatttgcacgtgtcgcttgcggaaagcatgttcatgactgacagattcatataatgaatcgggtcggtcactatgtttacgcccccggcaatcgcgcattcgcttgaaccgctgtatatgctctcaagcgccagatgaatggctgtcaaagaagaggagcaggctgtatcaacggcaatgctcggcccttggaaatcaaaaaggtaagataccctgttggcaatggaccagtagccgtagcctgtcgggtagtttttgttcatcgcgccggcaaaaacaccaatttttctgctttggcacaggttgtcaggcgtatagccggcatcctcgatactcgcatacgccgtttctagaaataatcgctcctgcgggtccattcgctccgcttccaaaggagaaatctgaaagaacagcggatcaaacttgtccatatcctcaatgaagccgccccatttcgtataaatagagccttctttacctttctcttcatcgtagtaatcctgccagttccagcgttcctgcggaatttcttctatgcagttttttccttttttaatattggcccaaagctcagccgctgtttttgcctgcgggtagcgtcctgaaacaccgatgatggccacgtcgcgaaccgaactttgccggacggtctctctggctgcccgcttttccctccgccgccagtcagtgcgaagcggcttggccggctgtacagcctgcggttctggtgatgccttccgttcttcctgaacaggcgtttgtcccgtcagtttgatcatcgcgtcttttttcgttttgattaagtgagcgacgagcgcttcgatcgtctgatattcaaaaaataaagtgctgctgacttggtccaatacatttcgtaacgcgtttgtcagctgtacgacgacgatagaatcaattccgtatttttcaagcggcgctttcggatcaatttgagccggcggaatttttaacgtttctccgattaacgttttcaagtactcggtgcttttttctgttaaagacgtgtcgcctttttgcaccgttgtttgcggcgctttaaattccggcgcttgtgctgcttttggcggagcggtccgttttccggcccctgctttaagcgttttttggcggacaacgccgttgctttttgccgctataatctgatggcttaattcatgtgccgcttctgccgggaagaagacagaatgccagccttcactttctaacacgcgcttccagctttccggatacaagcccgggcaccccggaatacgaagggcagaatcttcatgcagccaccagccttcaagcagtccgaaagtaatatgcgggaacaggctgtttcccgccatttcatttaagagcagcaaaccgttgtcttttaagacggctttagcgtttctcagcgtctggcggatgtctttcgtcgcgtggagcacattggcggcaacgacgatgtcgtatgcgcccggctctatgtcctggccggcaagcggcgcttctgcgttaaaaagcttatacgtcagataaggattccgtttgccgtattccgtctccgcatgcacgagaaaagctttcgatacatcggtgtaacagtattcttttatatggttttgatacggcctaagcttttcaaatatgcctgcgcttgtgccgcctgtgcccgctccgatttccagtatgcggatctcggcttttgaatgtttgctgatgttttctttcacataagccgttaatgtttctgacagggcgctgttaaagtaatccgcgacttgattgtgcttataaattccttcaacaagttccattgaagagtgcgggaacatgatgtcagtcgccggcacgtcttcgcgcagaatgtccggcagtgctttaagcatcgtctcggctaaaacagtcatcgcttttgtatcggcgttattgagccattcctctttttcctgctcccatttttgccatagcgaggcggttgtgtcttcggcacgggccgacagtttatatgaatccgcattcccttccagataaccatgttccagaaggaaagcgatcgtttgattgagccattttttaaaatattcgtgttcgggctcatacgctttaaggctttgcggcgtcagcaagtctgcttctttaagctgggcgatcaaaagccgatacagaaaatcatcgagcttttgatgttcagcctcttttacaagacgtgcgccgggcggagcggccttcagctgttgtgaagagacaagcggctgagacggataaacggaaattttttctgtttcactcatcccttcgactgcgaccggttttgtcgtatgaatgaaagctgcttgatcaaccggcagcgtcataagggtttcaagcgcctccatcgcagcgtccggttcgatcaatcccaatccgatctgatccatcagctgaataaaatcgccgtcttcagccgcttcgctgttgccccaatagccccaattcatgactttgaccggacaattccacgtctgatcaagttctttcgcaaatgcgtcactgaaagcgcatcctgcggcatagtggctttgtttcacgttatggataaatgccacaagcgaggagaagaagagcgcaaagtcaagcggctcccgtccaaatacctccgccatggacacactgacatcggcttttgcccgcagcaccgatttgaactcttctgtcttcatattatttaagctttgctcagacagatccattgccgagtggatgattccgttcatttttgtgtgacgctcttttatgaactgataagcccgctctaaggaagcactgtcagcggcatcggcggaaacatattcaggcgccgggccgaatgcgctgagccggtcgagtttcgcctgtatggaatcattcagtgtgcttcttccgatccaaatgatatgtgctttgtagcggcggatcatgtattcactccatgcctcgccaagatatccggcgcctccgatcacggcataaaccccgcctgtttggtacagcgtgccgtttttcggcatattgtcaagcggtatcagctgccgctcaaacagctgctgattgcggtacgcccaaatttgaccgttttttccggcagaaagactgagcgcctctttgaccggccagctgccgtccgtttccgtgtcaatcatgcggatattccaatgcggatattctttcgccattgttccggcaagtccgctgactgcggcctgtgacggggcggcgctgtcttgatcggaaaacggctgggcatttgctgtgacgatgcaccagtccaaatgtttttctccgtaccccaaggcaagtaatgctttcatcagcttgaacacatgaagaacgtttctttcctgttccttgaggctgcaagcactctcagcctgcggagcaagccaaatgatttgctccagctctttttgtccttcaagcatgtacgtaagagatgtgatatcatccgtacctctgatcggataataggaagcgttcggcagatgttcttttatgcgcgtatgcgttctgtcagtttcaccgaaaaccgcagtctgcttttccgctgtttttgctttcttcgttttttcaagtgcaacgggctcccatgccggaatcagcatcgtatggccgacaggcgcttccggggtttctccgcccgctgtttggcctgtgtcaagcgcccggacggacgcgcctttcatccggacataaaccgtaccggcatcatcgcacatatcaatgtcaaattttcttacgttgtcatctgctttgctgccttctgtgtaccggatatatgaccagatatgttcaggacacggcccgaacacttccacttcctgcatcgcaaacggcagagaaagctcgtggctgtctgcatcgtcatgtattgagcggacaagcagaccgacggaggcgtgaaaagcggcgtccatcatactcgggtgaagcgtatactgttctttattgtcatgtacggcagccgggagtgaaatacgggccaataatcggtcttctccgatcagcaattgctgtacgcctctgtatgcctctccgtaatccagaccgatcttctcaaaagcaccgtaacattcttccgcagtcacggtccctgaattgcaggaagctttgacagactcgatatcaatctgggcgctttccggttcggtaatgaccgcttcaccctggctgtgaataaccggatcttcgccgttttctgcctcactgtatatttcataggtaatctcaccattatcttctgggtaaagggcaatatgtatttccttcggtttgtcttcaatcatgaccggccggacccaaacaacctgcctgagtgtgacgctatggtctttttccgtcacggcagcagcctttttaaccgcctctctggccatttccaaataggcaacgcccggcagtattttttgtccgttgacgacatggtcagataggaaaaattcatctccagtaaaaagagacgtgaagcgctgctgcgaaaaatctgacgtgttttcttgtaaaagcggatgcagcactgtgcctgacgggcttttctcctgttttttctgctgcggaatccaatagcgttcttttgcaaacggatacgtcggaacgcttgttttacgcggtttacccgaagcgtacagcctattccaatctattattttcccttctgcccataactcggcaagccgtatcggatcatccgtctcgggagcggtttcgctcagttccggcagctcggcttgtccgcgccaaagaccggggatgttttcgtttccttttacgaaatcattcagcttttctttcaagtcgcggatgtcatttacaaggaagacagctctctcttccattgcttcacgtcctgtctgaagtgtataagccagttcagacagcaccgtcttttctgaaagcgatcgggctagtttttccgcataggccagaagcctgtctttatttcttgctgacagcgggatgagttttgctgcattgttctcaggtgcaggcgctttttgttcaggctgaatgtattcttctaaaatgatatgggcgttcgaacctgatgcaccgaaggaactgagtccggcccggcgcggataatgtgtgacttttccgttttcttcggctgccggctgcttccacggagcagtctgctgctgtacgtaaaaaggagatccctcaaatttcaggtaaggatttaattccgcagaatgcagtgatttgacaagcgttttgtgatgaagctgcagcgccgcttttgttaacccgctgatccccgccgctgattctgcgtgaccgatatttgatttgaccgaaccgatggaacaaaattgctgatcctgcgtcccttggctgaacgcttttgacagaccttcaatttcaatcgggtctcctaacgaagtacccgtgccatgggcttccacataactgacggtccgcgggctgatacctgcttttttcagacaggccttaatgacttctgcctgtgcagcaggactcgggacggtaattccgcttactttcccgacgtggttaacggcgcttcctttaatgaccgcgtaaatgcggtcgccgtcttgttcggctttttccagcggcttgagcaagaccgcaccgactccttctccggaaacgtagccgtccccgccctcgccgaatgtgcggcagcggccgtcacttgagtgcatccctacgcttccgtagctgagatatttcgccgggtgcagcgacaagttcacccctcccgcaagcgcggcttcacattcgccgcggcggatgctttcaatggccagatgaacggcggtcaatgatgaggaacaaacggtatccaccgcgatgctcggcccgtggaagtcacaataataggacactctgttggcgatctgcgcataattcagtgaaaccggaaaaggatcagcttcagataattgttctgcgccgattaaggaataatctttatgcatcacccctgcaaatacgccgatcggatgctgtttctcccctttattccccagcgtttcaggcgtataccccgcatcttcaatcgtttcccagcatgtttctaaaaacaggcgctcctgcggatccatcgtttccgcctcacgcggtgagattctgaaaaactgcggatcgaaacagtcggcatcgtcaatgaaaccgccccattttgatactgtttttccagacggggacgttacgttttgatatgttttccaatcccatcgggacttcggaacttcagtgatgcaatcggtgcctgccttaaggttttcccaaaactccgccacacttttcgctttcggatagcggccggccattccgataatcgcgatgtctccggtgtttttatgatgttctggcgcgtccggcgcttcagcttcagatcgtgatgattcggctgcacgttcctccgcatattcaaatgaaccagtctttttcagaaaggctgcgagttcttttatatttgtatattcaaagagaagagtgggcgcgaggtcagcacccgtctttttactgatatcctgtacaatctcaagcaaagaagatgaattcagtccaagctcgtagtagcctgcaagaacgtccagcgtctcccaaggttgcccaagcttatcagccaaaagcttctttaaaaacagaatgatgtctttttcatctgcgctttccggctcagctgcagcctgttgattctgttcggctgtattcgcgtcttcgagccgaaccgcttttcccgtaatgtttttaagctccgccaccttttgtccggatcggctgaagtactcgatcgtcatcgttgtgagttctttttcctgacggacgccggaagcggcgatacgcgccgtgcactctgattgaagcctgtcagcggccgtgaacgattcataatataaaggcaggtgaagccggtttgtttctgaaagcaaaccgctccccccgattccgctcgcatccaaaagggccggatggaataaaaagaaatcttttccttcttcgcaagaaagctcagccagcatgccgctttctgtttcgtacaattgtccatttgatttcatcatgccggaatgaaccaagtcatgatccagacagcggttatacatatcatcaagattcagagacctggctgactgcttcacatcgctgaaatcaatgatttcgtcaaatgtgacagcgtctcttttcaccatttcagccgtcgcatattgtatattgtctgacagctcgtcaccttgctgtttctgccctgaaagggagatgagccactttccatctccgctatcagaacattgaatggtcagaatgattgcagccgtttcactgacggttaaaggctgataaatcgtaacgtgcttcaattcaagctcattgtatacataaccgtgttcctgaaaaacctgataaatcaaatcgatataagcaagaccgggcaataccgcttcaccaaagaccatatggcccttcatgatgggatgatccagtgagatattgattttttccgatatcattccttcccactcctctcttatttaaatgctttccaaaacatttttttcgcaggaagctcttgtttctccgctcgtacgtcaggttcttttaccagagccttacgtcttaatgacggtaccggcagcggctttcttttcattcgggtatctttttcttcccaagcttccagaatgacgtgggcgttcgttccgccgtcggcaaagcagttgatggctgctgacggtctggctgcatcccattcgccggctgttttatgaaagtgaaaatctgtctttgttatatcaaaatgcggcatcggttcgtctcctgagagaaacggaaccgtttgtttatgcttcagcattaatacgactttaatgaagcttgcaatgccttctgcgcaaagcggatgcccgatgttcggcttgattgacccgatgccgagcggaacatgctgacctgagcggtatacggattgaatcgccttcagctcaagcaaatcagtcaccgcggaacccgatccgtttgcttcgatataagtgatgtcttccggctttttgccgcttttgagaagcgcgctttgcataacgtctttttgcgcctgcatattcggggctgacgggcctgccgttctgccgtcattgttcatggcggcagccttaatgaccgcgtgtatcgtatcgccgtctttttgcgcctggcttactgtttttaacagcaccatgccgacgccttcaccgaggaccactccgcctgaacgcttgtcaaatacgtgaaatgccggtttctcgtttaacagcccgcgctcttggaacatccggtgcgccgcatccgtgttcagcaggctgacgccgccaactaccgccgctttgatatcgccgcttctcagtgcctgaacggccatgttcattcctgtcaaagctgatgaacaagccgtatcaagcacgatactcggcccgcgcagatcaaaaaattgcgaaacgtttgccgctaaataattctgcccgcccgcaacaatcgggttgcgggtattcgcaagactttcaggatcaggctgatgctggctgcggcctccgatatacacaccggcttctatgcccttgatttcttcacgggtatagccggcatggcaccaaagtttcaagctctcttccagcaccgccaacgcctgagggtccatcgctttcgcgtcgttttccggaatgaaaaagaattcggaatcaaagtgatccatattgtcaatcaatcccgcaacatattgatttgcatatccgaaacgttccgccgggacggagccgattgcggacctgccgcttctcagcaagtcccaatattgttctaacgattccgctcccggaaaacggcagctcattccgacgacggcaatgtcttcagttacagcagcacgcttttgctcagtgtgaaccgtttgtacggcagccggaaccaacatttccgtatcaggttcctccctttctgcaagcagcggctgcccattggatacaagccattcggcaaacgcgtcaatcgtcggatgttcatataaaacagacggatctaagtcctctttgagcgcttgattcatttgctgtaaaagctgcgctaaaatgatcgaatcaaccccgtaatcctgaaacggttcgtctgtttccagatcttccggagcgattttcagctcatcggaaaacagtttcacaagccatgccttcgtatcaagaagcagttctctgtctgaatgtttttccgcgtctttgccgtttattacggcttcagtctctttttgttttttctcttgacagagcagcctgtcgggatgccattcgctccgatcaacgatagccggcagaacggacgggcggatgttttcagataaaatgcggtccagcaagtcaagtccttccgcgttggacagtcccagcagcccggtctgcttcaggttttctgtgcggatttcacccaatccggtttccttccagttcggccattgaatgctgactaacggatattgatgctgatgagccgccgcgaaataatccatgtacgcatttgccatcgcataatccgactgtcccgccgcgagtgccggaacgactgcagatactgaagaaaataagacaaaaaattgcaaaggatcatttgtgaaaaggctgcttaatgtttgaagcccggcgactttcggttcaagcacttcttgtatgtcgtcggcagtctttctgataaacgccggatttactgaattaaccgatcccgcacagtgaatgacgccgccgatcggtcccatcgtgcgccggatcgtttcaatttccgctgccgccgcgtcatgatcagacaatttcagactgatcaccgccacttgcactccttttgcttcaagctcttcaatcgcccgtatcttctctctcagcctcatattaacggctgtccgtttatgacggggaggaatcggctccctgcctgtcagcactacttttttcacgccgtgtttttctgtgaaatggcgggcgcataagagacccagtcccctcgtccctccggtaatgaaaagcacatggtcttcaggaaacggtgctggcttatgttctgctcgcttcccgcttggaatctcgctgaacaaagcacggtatctttgtccgtttcggcggcagacttccggttctgtgctgtccgccgaaaattcatctgcaatctgtttggcaagcgtctgctgatccgtatctgtatcggtatccatgtgtctggacgtcacgttttgatactcattttgaagcattctgtacaggccgctttttgccgctcctgcaagatgaatcgttttctgctgaaatggctccaagccttttgttacatatagcagcgtcagcggccgcgcttgccggcggcttgtatcaatcagagtctggagccggctgatcccttccagtgaagggtcttcgtctccgcatcccgtcagatcgattacgccatctatgtgattccaatcgctagctgcagtgtcagcggccgggagaatgaacgagtcagcgaaatgcttcgcagtctcttcggcaagttccgctgttcttgcatcagccagaatcatgaccgtcctgccgcttttctcaccggccgaatcgatctcacacggaacccattgcttttctaaaagcacagccttgcgccggtcttctgtttcctgcggtacggctttcggctcaggcagccagtacggctccttcgcaaatgggtaagccggcagactgattctgcggggtttttcgccttgatagagtctgtcccagtccgtctgaagccctttggcccacaattccgctattttggcgtattttttcttatcgaaccacgacctgacaagctgcttcagatcatcgtccgtttcaaatgctttgatttctttttttgccgttttgatgtgggcttcatatatcccttcacccgtatttccgtttacaaaatcggttaaacggctgatcagttcttctctcgaaccggctgtaaccgcaagacggtaatccatcgcatcacgcccggtctgaagcgtgtatgccatatccgaaagattgatattctgattggcttttgcaaattcgatcacagactcagcataggtttttacctgcggcgcttttttcgccgacagcacaaaaatgtttgtctcatcagacttgcggcttccccggtctttcggctgatactcttcgataacgagatgagcgtttgtgccgctgtagccgaatgagctgacgcaggcccgccgcggtgctccgcctgtttcccaaggtttaagttcggtattgacaaataaaggcgagtcatcgaaatcaaaatgttcattcggcgtgctgaaatgaagggtcggcacaagctgctggtgcttcatcgacagcagaaccttctgtacgcttgctacacctgccgccgccgacgtatgcccgatattcgatttaaccgaaccgatggcgcaaaattgtttgcggtccgttttttccttgaatacagaagataaggcttctaattcaatcggatccccctgctttgtgccggtgccgtgcatttccgcataggtgatgctctcagggtggatgttgtgcgcttcatacacttgacgctctaaatccatttggcttttcgcgcttggtgcggtaatgccgttggtttttccgtcttggttaattccagatccgataatgactccgtaaatatggtcttgatcggcttccgcatctttcagcctcttcaaaacgagcgcccccgcgccttcgccaggcacaaatccgttcgcactgttatcaaatgctttacattggccgtcaggagacagcattccggcttcacacatgctgatgtatgattcaggcgttaaatacaaggtgacgccgccgacaagggccatgtcaatttcatgattcaacagcgcctgacgcgccaaatgagtcccgacgagagatgaagagcatgccgtatcgatcggaatggccggccctttcaaattgagataataaggcaggcgggccgccgcgatgctgaaactgttgcccgtcgcgcttcctcctgtctgatgtttgtttaacatcattccgtattcattgttcataatccccaaataaacgccgcaattttttccgtttaattcttttgagctgtaacccgcatcttcaaaggctttaaaaccttcctgtaaaaatatccggtgctgcgggtccataagttccgcttcagacggagaaatattaaagaacagcggatcaaactcttcaatgccgtcaagcataccgattgatctgcagtatactttgcccttcttgtttaaggccggatcatagtatttgtttacatcccagcgggaaagcgggatgtcgcggatagcgtttttcgcacgggctaagttgtcccaatatgcctttaggtccggcgcatccgggtacttgcccgacatgccaactatggctatcgcgtccgctatctcgtctttaggctcccgtttggcctgcaccggttcaggttccttttgaaccgttaatctctccggctcggcaggtgttttctcctgcggggcggcttgctgtgtaagcggctttggacgtacgggaaccgcctgtttttttctgccgcggacggacggctgcgtacgcagaaaatcggcaaattgacggattgtcggataatcatacactttcgttacgttacagtccgtgccgtaccgtttattgacggcctttatccattcaagaccggtaatcgaatccataccgaggtcaataaaggcctcatcaatatccacttcatgccgctccatgtacaatacatcagccagtgcttttgataactcgtcatgcaccgcttcaatcggttcttccggttcggcggaagctgccgtttcagacatcgcctccagaatatccgcttctgcttgtatcacatgctgcttatgagcgtttaaaggctgcagcagtatgtttgacggtttttttacggcctctgttttctgcggttcggctgcttcctcaaggatcggttctgtcccgagttctttttgcaagaaggccgcaaactggcggattgtcggataatcatatactttcgtcaccgtaagggacgtgccgtacgctttattaacggcctttatccattcaagacctgtgattgaatccatgccgatatcaataaatgtgtcatctgcgtcgatatcgtcggcatccatatataacacgtccgccaacctttccgttaattcggcacttactttttcagcggataccgccggacgggaagcagactgtacggttcttttcggtttcgcgccgctcaaaggctgcaatgaaatgtttgacggtttttctttggcagtctcctcgtgaagagttgctacttcaatgaccggttccgggacggccgccggtgcgatcggcgcagactgtgtttcggccggtcttttgacagctgcatcagctgatgtgtcgatccaataacggtcttttgcaaacgggtaggccgggagactgattttttgcggtctgcccatttgatacagcttatcccaattcagcggaaggcccttcacccaaagctctaatacctttgcggctttgcctttttcaagccatgcctcaatggttttttccatgtcctcatcagccgcaaacagcgccatcgtgtctttattctgtttgacttgtccgcggtagagccggtcaattgactccttgccgcccgtaaattcgtcaagcttttcttcaagctcgcgcaaattgctgacaatcattccgagacgctcttccatcggttcacgtccgatttgaagcgtatatgcgatccggctcagatccgcttcttggtaacgcccgctccgcagcgcatcaagaagacgttccgcccgtttttgaagcctttgttcatttttcgcggaaaggacgatcatcgatggatgaggagcggcaaaagccgtctccttatcctcatcagcggtatattcttcgatgacgatatgagcgttgacgcccccggctccgaatgaggaaagccccgcggttctcggcagttctttatttattccgttttcatttatgaccggtcttttccactcttcaagcgtctgctgcactataaacggcgtagcgagaaaatcaatattcgggttaagcgtccgggaatgcagtgacggtgcgagcttcttatgtttcatttgcaggagcaccttcgtcagacccgcgatgcccgccgcgctttcacagtgcccgatattggattttgctgagccgatggcacaaaactgtttatcttgtgtttgttctgaaaaggcttttgtcagacccgtgatttcaatcggatcaccgagtgaagtcccggtgccgtgggcttcgatgtagctgactgccctcggatcggttcccgcgtcttttaacgcctgtttgatcaccgcggcttgggcgttcggattcggtacggaatacccgtttgtttttccatcatggtttacggccgttcctttgatcaggccgtaaatatgatcaccgtccgctttcgctttagaaagcggcttaaggagtaccgctcccactccttcaccgggcacataaccgtccccgccttcaccgaaactttcacatctgcctttgcttgataaaaatctgttctggccgagcatcaaatatttattcggatgaacggatacattgacgcccccggcaaatgctgtctcgcattccccgttccgcaagctttggcatgccagatgaatggctgttaaagaagaagagcacatcgtatccagcgccatgctcggaccgttaaaaccgaatacataggaagccctgttcgcaattgatgacggatttccggtcagcgcaagcgattttccgcgcgcctgttcttcggctccgtaaagctgatattcctcatacatgacgcctacgtaaacaccgacattggcgccaagcaaatcacccgatttttccgtgagctttttgcgcgtgtaaccggcatcttccatcgtttcgtagacacattgcaggaataaccgctcctgcgggtccatcaattttgcatcccgaggcgaaatagagaagaattgcggatcaaatttgtccacgtctttcaaaaatcctccccattttccgtacgtcttgccttctttatctttatcagcgtcgtaataaagactgtgatcccagcgatcgtttggaatttcagttatgcagtcagtgccttcactcaagttcttccaaaattcctgaagattttcggcttgcggatatcgtcctgatataccgataatcgcgatatcttcacgctccgtcactggatttttccgcgtgtctgtgcggacttgcgcaaagccttttttggcttcattccgtttggaaacgggctttatttcggctttttcagacagcgccggtttggctgcagaggtttcttctgttttcagcccggtcacttccagcagcgtgtcccggtgtgctttcataaaatactgcgccagcgattcgatattctgatattcgaaaaacaatgtttttgacaatgaaccgaagctcttttccagccggcccgtcaaatgcataatcataatcgaatcaattccgtaatcttccataggcgccttggcgtcaattttgccgacaggaagttttgttacttccgaaagcacatgtttcaagaaatgctccgttttttctgcaagcatgttctctccgcctgccgtaagacctgccggttcttccgtttcgctgcccttatccggctgatcatccgctgattttttcagaaacgcccggatttttgcggcgtagccttccgtcaccatgatttgggatgtgtttgccgcccacccgcggtacaaagcatggatgccgttttctgttttcatagggaccatgccgctttcttttgtcagcatcgcttccgtttcagcatcaaccgtcatgccgccgtctttccaaagcggccagcagattgaaagggtgtgtccatagcgttcatttcgggcttttttacggtttcttttttcactgaaggcgttcatgaacgcattggccatcgcataatcagcctggcccgcgcttccggcgcttccggctccggaagagaaaagaatcagaaaatcaagctcaatgtcctttgccgcttcatcaagatgaaccagtccggagactttcggcgccagcacatcacggatttcacctttgtgctttttcagaatataattgtcttttatcgttcccgcgctgtgtatgataccgtttaatccgccgtactgtcggcagatgtccgctgtgagcgattgaacttcttgtttttccgtcatgtccgtttgtttgtacacggcttgcgcgccgagatcggacagttcttgcagctggtcttttttacggttatccaacagagaacgccccgttaaaataagcacggcgtcttttgcatgtcgggcgatttctttggcgaataaaaatccgagtccgcccgcaccgcctgtgatcagataaacacctttatccttccacggcttttcggcgccgaactgttcaagccctgtttcctgccattgtgccgtatagcgcttgccgttttcatagcgaatatgtttgtcatcaggatgagcgctgcattcttttacatatcgggacagcgtgtctgccttgacgtccggctccaattcaatcagctggccggtcaggttcgggttttcaagcgccgctgttttcaaaagccccgttaagccgcaaaggagctgcgtatccgcttcttgaggcacgacaatctgaatgagctcgcgcccgccggaatttgaagcgagaattttcttcacttcttcgaacgcctgaagcgcacaagcttcaaaccgttcgtcttcactcttatgctgatcacggagcacgtgacagctgaagtctgtctgtatgctgttcatttgatccgtaaaccggtctgatatcatcacgtgacgggctttgaaatgagtcggcgctttttcatgtacagcggccttctcttcccatacgtgttcaaaaaatagtgtatctgttttatccgtttcaatttcccgtgcggaataaccagtcattttcacacatacattgccttgttcgtcacatacatcaatatccagcttctgcacggcatcttctggcttgctttcgccgctgtacgcaatggaaacccacatatcgcttttacagcttttcaacacatcaatctgttcgagagcaaacggcagcatcggccttatgtcatttccgtctctgtcaagcattaacccgattgtcgcgtggaaagccgcatccaaaaggctcggatggaggacaaactgatcttttgtatgagaaatagatgacgggagtgagagcttcgcgagcactttgctgtcttttgcatagatttccgtgaccgctttgtgagcatccccgtattcaatccccatctgtttgtatgcctgatagcaagcgtcaggtgtgatcagacggcgtgactctcttaatttgtcaatctcgattttggccggttcgccccctcggacaaacgccgcgcttccttgcgcatagagaacgggctcttgttccgaggaagccgattcaccgtaaaccgtgaagcccatctccccattttcttcatcataaagacggagatacagttctgcggattcatccgccgctgtaaacggacgtatccatacgacgtttttcagacggactgttccttcttccttcgtttctgccgcgtgttcaacggccgcccggaccatttccagataagccgcgcccggtaacgtccgctcgtttttgacgacgtgatctttcaggaaaaattctccgccgctaaaagaggaccggaaacgaacacctgacatgtttgatacattttcatgaaggagcggatgcagcatgcctgcccttttttgcggcagcgattctcttttctccgccttcggcacccaataccggattttttcaaacggatatgtcggcaggctgatccgattcggtttgttttcaccgtacaagagattccaatccatcgttcctccgccggtccacttttcggcaatcatctccagactcccggaagaaagccatttatgtatcaagtccggagcaagctctgcctgattgcttttatcggctcggttccgccagcatccgctgaccgttttacccgccagaaagccttccagccgctctttgagctgtgtcatattctgagcggtgaacgcaacccgctcctccatctgttcacggccgatctgaagtgtatacgccgcatcctcaagcggcaggccgggataaataaatgaagacagcttcgcaacatactcttttagccgttcttcattccgggcggaaaccgggaaaatgaaagtctgttcttctgccggttcatacgctgttctccgtgattcttcagggataaattcctccagaatgagatgcacgtttgaacctgtcgccccgaaagaactgatgcccgcacgccggggatatacggtctcgtttccgttttccgtcactgatggctgctgccatgcttcggtatgatgctggacgtaaaacggtgattgttcaaaatctaaatacggattcagctcctcggaatgaagagacggcaccaaagttttatggtgaagctgcagggcaaccttgcttaagccgctgatgcccgccgccgattccgcatggccgatattggacttcactgatccgatcgaacagaactgtttgtcctgtgtgtactggcggaacgccttgacaaggccttgaacctcaatcggatcgccgagagaagttcccgtcccgtgcgcctcaatataactgaccgtgcgcggatcgatgcccgctttgtccaggcattcttcaatcaaatcggcctgcgcgacaggactcggcacggaaattccgctcactgtccccacgtggttgacggcactgccctttatcaccgcataaatccggtctccgtcttttaccgcctctcgcagcggttttaataaaacggcaccgattccttcagccggtacatagccgtctccgtctttcccgaatgtatgacaaaccccgtctgttgaaaacatgtcccataaaccgtatgtcagatatttattcggatgcagcgacaagttgacccctccggcaaccgccgattcacattccccgcgccgaatgctttccgcagcaaggtgaaccgcagtcagcgaggatgaacagaccgtatcgacagccatgctcggcccgtgaaaattgcaaaaatatgaaactctgtttgcgatttgcgcataattaagagaaagcgggaatacatgatcttcagaagaagcttcagccccgaccaacgtataatccttatgcatcacccctgcgaagacaccgacgcgctgcctcttattccgtccgcgcgcctctgcgagcgacttcggcgtatatccggcatcctcaatcgtttcccagcatgtttgtaaaaacagccgttcctgagggtccattgtttcagcttcccgcggcgtaatccggaaaaattggggatcaaagcaatccggatcatcaataaatccgccccattttgaaatgctctttccggaaggcgactttacattttcaaaccggcgccagtcccagcgagactccggaatttcggtgacacagttttttccttctttcaggttttcccagaattcatgaatattttcggcctgcggatagcggccggccatgccgataatcgcgatatcttcatcttgcggaacactgcttttccgtcttctttctgtttgcttctcaacctgcttctctatttttgcaggagacgcgctgaaatggcttccgtactgctctgtcaggaaagccgccagctctgatgccgtcgtatattcaaacagcaaagtcggagaaagggtttcgccgattttttcactgatcgtttcgacgacgtcaagcagtccggacgatgtcagccccatttcatagtagccgacttgagaatcaatctgttcaagcggcttgccgattttttcagccatcagattcatgacataccgttctgcttcctcatgcgggtgtccgccttcaagcgatgccgcaacttccggtaaaccgactttttcaggaggcttctcagcagtctttcggtctgtattgatcagctcggcatcccgcacgagcttgcttgtgaaatctttcagctcggctacttttcggccggatgtgttaaaaaactccagtgtaatgtaaatgagctctttttcctgccgaagcgacgaacgtttgattctcgtgatgcagccggcctgcaaaggttcggaagctgtaaaagattcgtagaaaagaggcagaaacagcctcttttccccatttaacagcgaggagatcaataggtttgcgccgacgccgcttccgtcaagaagagtcggatggaacaaaaacccttcggcctgtcccatcgcgtcttttccgagcgatacatcaaaggtgacgccgtcccgctcctcaaacacttctccttccgctttcatatatccgctgtgaaccaattcctggcttctgcattgggcatacagctcatttaaatcgatggtgcgttccgcctcgcgtttgacagagtcaagatcaagcgtgtcactgaaaactgcgggtgccgtctcgtgcatttccgctttgacgtaaatacgttcttccggctggactcgtccgccgctgacctcagccccttttgcggtaagtttccagcgcccttcttttacctttgtacattcaaccgtaagcttgacggcgctgtcttctttcgcgataagcggctgatatatggataaatggcgcagctgaagcccgtcgtatgaatagccgcgctctttaaaaatctgataaaacatatcaatataagccaatcccggaaggactttttgtccgtaaacgtcatgatgtaaaataaacggatttttcagcgataaagtgatttgcttattgaagttcttcacgttaaacctccacttcataggtatcccagatgtttgccgcagctttttcgttcgtttcttctttgctgtccggcgaaatcagccgcttatttaatgcaggcggtgttaaagggtggcgcttgattcggcgcccttcgtctccctgccacgcttccacaatgacgtgggcatttgttccaccgtcggcaaagcagttaattcctgccgccggcattggtgacggccagtctgccagagtgcggctgaactgaatattggccttttctctatcaaaatgtgtgttttcatgctcacctgataaaaacgggataaagctcttttctttcagcatgagaacaacctttatgaaacttgcaattccttccgcgcaaagcgggtgcccgatgttcggtttcacagatccgattccgagcgggccggcgtcttttgaacggtagacggattgaatggccttcagttctaacagatccgtcacgaccgtgcctgaaccgttcgcttcaatatgagtaatgtcttccggctgttttccgcttttttcaagagccgtcttcatgacggatttttgcgcttccagactcggcgtagccgggcctgccgttcttccgtcattattgacggatgccgccttcactacggcataaatagaatctccgtctgcaatggcctgagacacggtttttaaaagaaccattccgacaccctcgcccagcacgactccatcggcgcgttcgtcaaatacatggaacgactgcgctttacttaatatgccgcgctgttcaaataatttatgggtttcttctgattcaaacaggctcacaccgccgacgacggccgcttttatttctcctgttacaagagcctgcacggccatattcattccgactaaagcagaagaacaagccgtatcgaggacaacactcgggccgcgcatatcaaaatattgagagagattggcggccaaataattctggcccagcgcgacgatcgggtttttcgcatccagcagtttctcttcacccggtctgtgacggctgcgtcccccgaggtacacacctattgcttctccctttatctcatccggcgtatagcccgcgtgataccacaggttaagacattcttccagagcggccaaagcttgagggtccattgcctttacatcttcttcagccagtaaaaagaagtccggatcaaattgatgaattccatcaagcattcccgcgtaataaggcgtcttcaccccccatcgctcagccggaacaggaccgatagccgaacggccttcagccaaaagcgaccagtacgcctctaaggaagccgcccccggaaaccggcaggacatgccgacgaccgcgatatcttcccggtgaatctgtttttcggccgcctcttcttgcaccttaacggcttgtgttacaattaccggctcagccggcttcttcataacaggctcagccgccgccaaatcaaaccgttctgacaaaacttctgtatacccttcgagaagccattttgcgaaagattgaatcgtcggatattcatacagaatggacgggtcaagcgatgccgagagattccgattgatccgctgcagaagctgagcaaggataatggagtccactccgtaatcttggaataatacgtctgtctcaagctgatcctggtcaatccgcagctcttcagaaaataattctttcagccattcttctgttttccttgttaattgagcgttgtctgcggcggtatcagcggttttttccgccgattttaccatagccgggctcattggctgatcctgcctgctccgccgcaggaatcgctccggcttccacagcttaggattcagaacggccggcagcaccgggccccttgctgattcaagaagtatgccgtcaaggagctgtaatccttctgcattcgtgatgctgtatagcccgctctctttataagctttgttcgttacttcgcccattccggtttctttccagttcggccactgaatgcttacgatcggcagctgctctttgtatgagtctgcaaaatagtccatatacgcattggccatggcatagtcggcctgtcctgccgaaagcgccggtatcgcagctgacacagaagagaacaagacgaaaaacttcagcggctcttcgctgagcacactgtataacgcctgaagcccctctactttcggctcgagcacgcgctgtatgtcttcatcggtttttctgatgaatgcgagcgtctctttatcggtcacacccgcgcagtgaatcacgccgccgataggtccgagcgtctgtttgatctgactcaattcctgtctcagcccggcttcatcagctaacgggactgacaataccttcacttgtacacctttggactccaagtcgagaacagcttcaattttcgcttttacagaagccgtcaccccattcagtccgcccgtccactcacttcgcggcggaagggtctcacggcctgtaagcaccagttttttcactccgtaatgttcggcaaaatggcgtgcgcataaaagaccgatccctctcgtccctccggtgatcagaagcacatggtggtccggaaaatcaattctctcgccttgcgtattcatattttctgaaccgctcaatacggcgcggtagcgcaagccgtccctccggcaaacttccgcgtcatcagtacgggcatgaaactcatcggcaatctgcttcgccagtttgtcatccgaaagcgctccttcaagatcgagatgccttgaagacagatgactgtactcgcatgccagcattctgtacagcccggcccgttttgctcccgttatttgattggcctttttccccattgactcaaggtctttcgtgacacaaagcagtgttatcccttctttatgcccatgctcaatcaattgctgaagccatttgataccggtcatatctccagaagcttcttctttcgctgcaccgagaaggtcgatgactccgccaaacgcctgccagtcatattcacctgtaaggtctgatgttgtgataatacggtgattcggcatatgcgctgcgatctcttctgcgagattgatcgtgtccccgcctgtcaaaatcgcaacggaacgtgggcacggttcacgcagttcgagcgggctcggttcccattgttttgtcagaatacgtttcatccgttcctctgtatggaccttatttttgtcaggattctcaggcacccaatacgtgtcttttgcgaacggataagacggaagactgagtaaacgcggcgtacccttttcatacagccggttccaattcaacacgccgcctttcacccatacctctgccagcttggcgaattttccttttttaatccaggcgtcaatgacgatgtccatatcttcatctgccgtgaacaaggcaaacgtatctttattgcggtgagactggccggtatacagcccggcgatgtttttctcatttttcgtaaatgcttccagctttgtttccaattccgccatcgtcgctgcaagaatggccaggcgctcttccatttcgtcccttccggtttgcagcgtataagcgacgcccgccaagtcttgatctgtatacggcgtttgacggatcgctttttgcagctgctgcgcctgttcgaacagtttttcttttgatttggcggacaaaaggatgattgccggattttccgggctgtgctcaggcagagcggctgctttcgggacatactcttcaatgacgatatgggcgttgaccccgccgatgccaaatgagctgaccccggcccggcgcggaatggcatttccgtttctatctttcgctgccgtccattcctgattttcccgcacgatgtagaaaggactgtcatcgagctgaatgtacggattgatcgtctcgcaatgcaggcttttcaccagcgttttgtgcttcatttgcaaaagcactttcatgacgcctgatactcccgcggcaagctctaaatggccgatattgctcttgaccgaaccgatgccgcagcggtgatcggagacttcaggctcttgatttgttttcgccagctcgtgaaacgccgctttcaaaccgtttatttcaatcgggtcgcccaattccgttcctgtaccgtgcgcttcaatatacgtgacggtgctcgggtccactcccgctttccgatatgctttcaccaataaatcagcctgcagtttcggattcggcgaggttaacgtattcgcccggccgccgtggttttcagccgtaccgcggatcacgccgtaaatcggattgccgtcacgttctgcatctgtcagtttcttcagcatcagaattcccgcgccttctcccctgacatacccgttggcatctttggagaaggttttgcattttccgtctttgctgagcatgcctgctttgctgtagctgatatgcgcttcttccgtcagaatcgtgttgattcccccggcgatcgccatgtcgcattctccgttttctatagcggataccgcccggtgaatcgcaacaagcgagcttgaacatgccgtttcaaccggctcgctcggcccgtgaagatttaacaaatagcttaaacggttcggaccgatggaaggaatcatgctgcctgtcgccgcatgtccttccggcgcaagacctgcccttgtgaacaaatctttataaccggtatttccggtgccgataaagacacccgtatttgtgccggaaaggctttccggcttacagcccgcatcttctatcgcccgccatgcataagtcaataacagccgctgctgcggatctaaatattgggcttcccgcggtgaaatcccaaagaacagcggatcaaattcagctattccgtcgataaagccgccccacttaatattcgttttgttcctttcaagattcgggtcgccatcaaacgcttgccaatcccagcgttctttcggaatggttgtgatagaatcttttccttctttcagattgcgccaaaattcctctatatccttcgcgcccgggaatcggccgctgattccgacaatggcaaccgggttcaagcggcgcggctcttgtgtcgctgccctagcgttcatcaccgttgcgaaacgctttttccgatgcgttttcggtttttgggcttttggctgctcttttttcggagactccttcttcttttcgccgaaacggcccggatgctcttttgccaaatatccggcgagattactgatcgttccgtactcaaagaaaatcgtcggcgccagctccagctgatacgcttcatttaattgattcgtaaagacggtaaaggatacggaatcaaaaccgtattcactcagttccgtatctgtatcaatgtcctcacggtcaacttttaaaatgctgcttaccatggctgtcaaagcggtgtgaagcgcttgaagagattcttctgcatcgtgtttttcttccggctgaaaaggaagacctctctctgtttcatccgacaaatactctgctaaactgcggatcgtcccgtgctcgaagaagatcgtcggtgccagctccagctgatacgcttcatttaattgattcgtaaagacggtaaaggatacggaatcaaaaccgtattcactcagttccgtatcaatatcaatctcgtcttggccgacttttaaaattgaactgaccaatctgataagcgcaccgtgccatttgtctcccgaaacggcggatacaggttctattttctccacctgcggcttttcagtttcagaaacggacaggaacgactgttttaattttgctgcgtgtccttcagctgctaaaagctgcggcttttcctgagccattccttcataaaatgcagccaggcctgacgccttttgaagcggaaccatgccgaaagcttttttcatcattctttccgtctcgtctcccgcctgcataccgccatctttccacagcgtccagttaaaggcgatcgtttttccgtgccgcaggccattctccgtaagggattgcctgtaagcggcgtatgcatccataaacgcgttgccggcggcataatcagcctgcccgacattgccgagaacgccggaaacactggagaacaatacgaaaaagtcaaggttgcagtctttgctggcttcatctaaataagcggtgccgatcactttcggatcaagcacttcccagaactcttccttcgttttttgcagcaggaaacggtcttgtatcacgcccgctgcgtgaataattccgttaagctccccgaattccgccgtaatctcttttatcagcgcttcattttcccgccggtctgccgcattcagctttttgtagacgacatttgcgcctgagtcctgaagcatagcaagctcacgctgtttggcttctgccagatttgagcggccggtcagaatgattttcgggtgttttacgcgaccagcgatttcttttgcgaacatcaaccccaggcttcctgcgcctccggtaatcagatatacgccttcgtccttccagacggcgccgccacctgcaggatgcatttcttcccaagccttcacataccgtttttctcctgtataacggatatgtttatcatgcggccgatggctgtcgtttttcagtttttgagcggcagccggcatttcgccgattgattccatctcgatgagctgacagtcaagttttccgtattccagctcggctgtttttaacaaacctgttaaccccgcaaacaattgctggctgccgtctgctgaaataacagtctgaatcagaatgcggccctgccttttttcgctgatgatccgccggatgtgttcggcgattgtctgcgcgtagccttggaagcgttcagcggctgtttctccctcaccttctgcaatcagcagctcggcgtctttcaggccggatgccgcttcatcttttatacggcaggcatcttcacaaagtatgatcaaatgctcatcagcatggacagaagctttctcggatgcggcggcttctttccaaaccggtgcaaacaagaccttttccgagcctgatggccgctgagccgattctgcatcgccttcaagcactctcgtagagaatcctctcaccttcacgcaaagcgctcctgtttcgtcgaacaggtcaatgtcggctttctgcacggaatcaccggtttgatatccttcgctgaagcgtgcatgcgcccgcatagtcggtgtgcatggtttgatgacttcaaggtattccagcgcaaacggcagaatcagcttttgtccggaaaactcctgcataatgcagatcgtcgccgtctgaatagccgaatcaatgatgctcggatgaagcgtaaattgtccgttcgtatgagaaacagaatccggaagctgtatatccgaaagcacttctttctcgccgataaaggcggacttaatgccttggaaggcttttccgtggaacatccccctgctccggccttcccgataaaaggccgccggatcaagaatgtccgctgtgcatctgttttgtatggcagaaaggtcggcctcaggctctcgttcagcctttatgatttcagcccgtccttggctgtgcagcacttcttcatcgtcagcgtttacgctgtaaatgtcatatgagatgatgccgtcctcttcaggaaacagcgcgatatggacttggcgctcttgttcgtgaacgacgatcggtttcatccagacggtatgatggagcgttattctgtcttggtcttttaataagccgccaagcgcccgttttaccgcttcataagacatttccaaatatgccgctcccggcagcaccgctttttccctgaccacatgatccttcaggaaaaattctgagcctgtaaaccgtgagctgaaccgctgaacggccaaatctgacgtattttgctgcacaagcgggtgtaaaactgagactccggtgtgtgcggcagatgttttcttttctgcttttttcggccagtacggctcctttgcaaacgggtagaccggcacgctgatccgtttcggatgcttgtctttgtaaagcttgtgccaattaatggcgacacctttactccacatttcacagagcttcgttccttttcctttcgcaagccatttctcaatgagttcagcgctgtcatcatcatcagaaagccaggcaatatcttttgcctgctgtttttctcctctaaagcagcctgttacagccggcttatcattgataaaatcggcaagctgccgcttgagctccgcagtgccgcttgtgataaaggccgcgcgctcttccatcgcttcccttccgacttggaacgtgtaggcaagatcagcgaggccggcgtccgtttttctttccagaaaagccagcagctgttttgcgtactccttcagacgatctttttttctggcagacaacggaatgatgaacggaccggcagcgtctgctgcttcggatgcatccggatattgttcaaaaatcgcgtgtgtgtttgttccgccaagaccgaaagagcttaaagccatgcggtgcgctctgttctcacgggttaactctttcttttctcccgctacgtaaaacggagagtcttctaaatgaagattcgggttcggctctttgtaattgatgctcggcgcgatttcctgatgatataagctcatgacaaccttgatgcagcccgccattccggccgctgtatccaaatgcccgagatttgttttgactgaaccgatgccgcagtattgttttttatctgtatatcggccgtacaccgattgaagtgcggacagttcgatcgggtcgccgagttttgttcctgtgccgtgagcttcgacgtacgcgatcgtttcaggatggatgccggtctgatcaatgaccttctgaatgacctcagcctgtcctttgacgctcggcgcataaaatccgaccttatccgctccgtcgttattgacgccgattccgcgcagcagcgcataaatatggtcgccgtccttaacggcatccgacgcttttttcaagagcacggcgccggctccttcaccgccgatcattccatcagcagccgcgtcaaacgctttaatatgcccgtcgcttgaaaaattcagccccggctgatgaacatatccggcacttgattccgtatgaagggtcgcaccgccgacaagggcatacttggcttcgccggaatgcaggctttgaaaagccgaatgcaggccgattaacgaagatgagcagttggcatggacaaaatagctcggccctttcaacccgagtttatgagaaatcatcgtcggaatcgtgccgctttgggcaagcacccatgatacgtagccatccggcgtttccagctgtgctgtcgtctcctccggcagcaggctgcggtaagagttcgtgcttgcagacatatacacgcttgtttccggaatttcttttgagatatatcccgcatcctcgattgccttccatgaatggagcaaaagcattctcagctgagggtccatatattccgcatctttcggtgaaaagccgaagaaaccgggatcaaacatttctttcccctctaaaactgatttagccggaacgaagccgggatgatcagccagttcttcagaaacaccggatcggcggagctcctcttttgaaaagaagttgatgctttctttgccttctttgatgttattccaaaattcataatgatcttttgctcccggaaactcacaggatataccgataaccgcgacactgtcctcataataatcgggaatttctcccgctgggtgttcccggtcttctgtattcactttcttttgcggcacaggagccaaaacggtttctttcagtttttgttctgtgatgtaccggctgatgtcttttaccgtcgcgtattcaaacagctccgttacactgaattcacaatccagttcctgcgtcatccggtcagtgacagtcacggcaagaagcgaatctccccccgcatcaaaaaagcggtcatcaagctctatatctttgcttttcaatacatcctgccaaatcgccagcaccgcctgctggatatgagatgatgaaaatgtttgtgtgtccggctgcttttccgtcagatcgcgggcagcaagaagcttgcggtcaacttttccgttcggtgtgagcggcagctcttcaagacggataaacgaagctggcgtcatataggccggcagcgcttgtttcaaatgattgcgcaattcctttgcagacggaagcggctctccgtttttcaggatataaaatgcgcaaagtttttcatttccggagtgattgttcacaaccactacgctttcctgtacggccggataggcattcagccggctctcaatatctccgggttcaatccggtagccgcggattttgacttgggtgtccatccgtcccatgtattcaatgcggccgccgggaagaaaacgcgccatatcgcctgttttataaagctttgatcccaattcgagccggtggctgacgaaaacgttatctgtcagctcaggcttgttgaaataccctcttgccaatccgtctcccgcaatacaaagttctcccggcatcccttctaaaacagggttgagagcggaatccataatatacacacgggtattggcgatcgggcgcccgatcgtaagcgcgctctcattttccgttatacgctgcaccgcggaccagattgtcgtctctgtcggcccgaacatattccaagcctcacttttcgtatcgagaaactgctgcttcaattgttcgctaagcgcctctccgccgcaaaggattttcactttttcttcatttgaccatccggaatgaaagagcattttccacgtaaacggcgtcgcctgcatgatcgtcggtttgtactcttgaatcagctctttcagcttccgtgcgtcttttgtgaattctgtcttacagatgttgcactctgctcctttgattaaagggaggtaaagctccagtgccgcgatatcaaagcaatatgtcgtgacggcaagcagtttgtcttcggacgtaagccccggttcattcgccatcgagattaagaaattggtcagcgcccggtgcggaatcatcacgcccttcggtttgcccgtgctgcccgacgtgtaaatgacgtacgccagatcgtcaggtgtcactaaccgcttcagcgacgttctttccgcggctgtactttcaatacgagaccaatcgcggtcaatggcagttgtctgcacgcctccccagttcaaggagtgctctaaatcagctgtcgtcagacacattgaaatcctgctgtcggcgatcatatattccaatctgtcagcgggataagaaggatcaagcggcacatacgctcccccggcttttaaaatgccgagaaggccgacagccatatgcaatgaacggtctgtataaatgccgatgagatcatcagggcctgcaccgtgcgcctgcaaatagagcgccagcttcgtgcttttttcatcaagctcacggtacgtcagcttttgctgttcatacacgaccgcacaagcgtccggcgtttctgccgcctgacgttcgaataattcatggaagcaggcatccggatattcacggcttgtctcattccaagtcttaagaatcatgtgctcctctctttttgtcatgagagaaacgttctcaagcggcatatccggattcgccgtcaaagcttcagcggcctgtacaaattggctgaaaagtctggccgcccctgcttcgtcgaataattcggtgctgtatttaatcgtaagatccatgcctgatgcttcttcccacatttcaaatacaagatcatattccccctcctgatgaatgtcttttacaaactcacaggagaattccttgtattcatccagcatcgattgatagcttgaatactgcagaaagttctgatagaaaaaggcattgctgaaaacaggcgaaccgttctgcaggggtttcgcatgcacatcacgcaccattttcggaaacggataaaaggagtgatccagtccgtccagaacggcatcctgcaccttttgaacaaagtcagcaaatgtttcttttcgtccggctctgctccgtataggaagcatgttgaggaaatggccgaccactccgtcaaagcgttcttcaggtctgaccatcgcaggcatgcctgtcacaatatcttccttatctgtatatttgcttaaaagcaccatatagcagctcagcataacggtagacaaatgaatcgaacgggatgcggcaaacgccgttagattattcagcagccgttcgggaagacggcgtgtcagcgtatcttctgtaaactccggaacgctgctgcccgtgcgcatcggcggaagctgaaggtcaggcagatcgcccccgagctgtttcatccagtaagcgcgggcagctttgctttcttcacccgctaaataccgcttttcccaagccgcgaaatcggaatgaatgccgggagcggcggccgcaaactcttcttttccctccagcagcgcctgataatgatccagcagactgtgaataaatgtaatggatgaaaaaccgtcaaacacgatgtggtgaatgaccgtcaaaagataatgttccgaggcggattttgaaagcagccgcacgcgcagcaaaggcccgccttctttgacaaacggctctttaacttttttccgtatcagagcgggtatttgtgattcattgacgtcagaaatatcttcttccgagaatacaaaaggatctgccgcttctatgaaataaaacccgccgtctgtttcattcacggcgcttttgagcatcggatgctgctttaatacgagctgaaacgcctgtttcagtttctctttgtcgattccggttgtgaatcggaaacagagcgggacatggtatgcagtcgtttcaggcgacattttctgcaatgtccacagccctttttggacttctgaaagcgctggcgccgtttgccgtctctcccgttctgccggcggttcggctttttgggaatgatgctccgctgacatgtttgccgctttttcagcagtataagccgctaaagcgccaatcgtcgggtttttgtgcagctctcttgccgtcagccggatgtgatacgttttttcaattgatctggcgagtttcatcatcttgatggagttaacgccaaggctttgaaacggtgtatttggatcaacaagctcatccgcgatggaaagttcctctttcagaaaacggataaaatcccgttcaatttctttctctgcagaagccggggctgaattgccgccttcttgtctgttattatgtaatgaatcaaattgcccttgttcgaatgaatgtttcagctgagtgcgctggattttcccgattgccgtcttaggaatgtcttcttttgcgaccggaagcagataatcaggggtaacgccgattctctgtgtcacgtgctggtgaatgtgatgaataagcttcgtcatgcggttctcatccaatggaacagacgtcacaaagaaaatcgccagctcatctgtcgtgctttgattcggccggacggcgcatgccgctgtatatgacgtttcaatttccggcaattcctcaacggctgattcaatggcgtggctgtaataattcacaccgttgataatgatggcatctttcgtgcgccccgttatcgtcaggcggccttcacgcagaaatccgagatctcccgtttcaaaccagccgtcttctgtaaagacactctcgtttaagtccgggcgctcataatatccgctcgttacagtcagaccggacacttgaaagcggccgatttctccttcttccaccacttgattgcggtcatccgtaattctcatattaaaccccgggatcggcagaccgatctcgacgaaacgatcgtcgtcactcgtgttttccagtgtaaactcatctgagaaaattacgcccgaagacgtttcggacattccccatgcgggacggatggcattagccggcagaccgtgcggctctaaaagctccataattctgcgtccgactttcgccaccgcggcctccccgccgttcagcatataacgcatggaagataagtcccatttccgtgtttgaatctcttctgcgaaatcggcaagcagcccaaaggcaaaattgggggcccacgtgaccgaagcgcggtaatgatcaatcaggtcgagccattttaaaggatccatcaaaatggattcgctcggtatgttgatttcctcacatccgagataaacatcacgcagatgaagcattccgatgccgccgacatggtcaaaaggcatccagttaaacgtgacatcctcacttgtatagccctgcatctgaatatttcctttgaccatgcagacgatgttttcatggctgagcatcacggctttcggcgtgcccgtgcttcccgaggtcaaaagcagcatcgccaaatcttccggacggggatgatgacagtccgtatccatttcatgcgcactgagatcttctgccgccaaagcgcaaaacccggaaagctcctgctcctccgcccattcagtcatctccggcagcacttcacggcttgtgatgacatacggctgattcaaaagcgtccaggcgtctttcagtttttgcgtcccgctgttcatttctgtataagccggagcggccgcaagcggaaccgggatcgctcctaaaaaaacacagccccaaaacgcaggaatcagctgggaattgtcactgagctgtaatatgacttcatcctgagccttcactcctgattggcggagccctttcacaatcgaaagagcgatctttttcaggccgctgtaagtctggtacactttggtgccgtcaggctgtatatatgtgatgcccttttgatctcccgctgccgcggcggttttgtgcaggacttcaggaatcgtcatcggctgatccgctgaaagccgcaatggttttccgtagctgacagatggcttgagtaacccgcttgccttcatatcacttttcatagagctgcctccatttcatctgtatgtaagatgtatgtcttatactccgtacatcgtcgtgattcgttttttcacttcatcatcatgaaacgtctcatcgtgcatgattaactccttctcaatgacagccggaagctgctcgcgaaacggcgtcaccaagtgccttttcaatgtaattaaagagtttctcggtttttccgcaagctcacgggccaattcctgcgcatagtctaatacttcctgccgcggaagcaccggaaaaggcactcctcttttctccaggtcaccgccgcggtagtggccgccgtttaacagcatttcatggccgaggcttgccccaagcttctccggaacgataaaggtagcccccattccgggagtgaaaccgtatttcataaagtttgcggtatacacgctttctttgcttaaaatgacaaaatcactgaaaagccccatgacaaacccgcctccgattccgtggccctgcatggctgaaataacggggatatcacattccagcgccaaagaatacatgcggtcttccgtaaacttcgtgatgccctgctgaatcctgagcagaccttcctgtgtgcctccggaagcaaagtaatggccgtatcctgttaaaatcacagctttatagactgacgatttttttatacgggtgaatgcttccatcaatccatccgtcagttctttggagaaagcgtttttatgggctttatcctgcattgtcacttggataatatccggttcaatttcgagcagttcaactgcggcgttcggcatgatatcctcctaactgttctccgtttcccaaggaagccgccccgtttctgcataacggaaaatggctgattggttatccggatctgaaaacatcgcttgattttcggctagagcaatggatttcgaacgatgaacaaggtcgtttaaggaatccatgtattttttatagcggatgactgcttttttcgacagcgggcgaagacgcagcaaatgctttctcagctctgttgctgagtccgggacgcatacgtcacaaagtccccattcaagcgcctggcgtgccggcacgggctttgtcatgatcgtcatataatgagccttttgaaatccgattctttgaattaaaaacggcagaacgcaggctggataaagtccgaataacagttcagataaactgaacgaagcactctcctctgcaatgacgatatcgcaggcggcggcaaaaccgacacctcccgcatttacttttccgcggacgcgggcgattgtgatgtacggcccggattttaatgccagccacaaacggtaaagcggctcctgcgattccgcatgctgcattccctgcctcattttccggtacatctcatcaaaatccgccccgaaacaaaatacctccggctgcccttcaagcactacggaggtcacggagtcttcacattcagtaagaacgtgcaggcattcctccactaaacgctcattaatcgtattgttggcttcaggccgatcaaaggtgatgaagcagacattttgctgaaaacggacgttgatcgtctcataggtcacgggatccacctgtatttccgatgaaattccgtgatttcttccaaatataaacgagggctcccggcatgatggtctaaaatgttcggaatcatattcatatccaatttgacattccgggttccgaacttcaccagaccgctgcctttaaacagttcttcatactcttccatggacagcctgtatctgttgttcagatgctcttctattttgaaagaatgctgccgcgtttgtccttcaggcgtcacaacgccgctgtaaaattctgaacagcatccggagccgtacgagaaacagccgatccgcttagaagtgtcgaaagccccttgatcaatcgtgcttgcaagagccagtaaagaggctgcccccataatgtttccgactctttggcagtagcggagccccggctctaccctggtttgaaaatcctgttcgatctcagcgtttttcgcttttgcaagcttacgcatcatcgtccggtgagctcctttgaccatgccgccaaacggtgtatggaaggcaagatagtgaaacgtctctttatagtcagcgcccggcacacggtttttgtactcgcgaaatgtctgttcgcagcaatcgagataagacatcaatgacaagtcggcgtcaccggcttcactgtccgggatcggacggcatgtatccatcacctcatagccgtaatagccgttggcgcccgcatccgcctgaaatacgattgggttttcaccgatcaataaggcgacggcacccgctccggcgctcggttcggcgtaagaccaatcctcgcttaacgcatcgccgccttcggcaattaaaaaccgggaaatatccgtcgcgacgacaagcgccttcgctccgggggatgtctgcgacaaaataaaattaagcgccatctgcaaacccgccgttcctgaataacaggcctgcttcagttcaaataaacggcagttccggttgaggcctaaataatcatgaatatatgtactgagtgattttccgaagtcgatgccggactccgagcaggtaatcagcagctcgattctgtctttttcagcctctgtcaatcggtcgataatcggctttgccgcattaacgccgaatgtgacggggtcttcgtacggaagcgccaccgctttttctttcatcagtaaattctcaaatctggcagggtctaagtttctgtactccgccagctgcatgacatcaaggtatgccgtcccgccaaacacatttatcgcttctattccggcagccgccatgaacttcgcctccaatatgaattttgagtttccgattttttcaccgttttatcagacagcctgtaccttttcataaagctttgccgccaattcgccgatgtttgacactcccgtcagctcaacacgcgggatctgcagtgataattcttcaagcatcatcgtgataatttcggcgcggtccactgagtccgcccccagatcaactaaccggtcttcctttgaaagctgttcgccttctaaatcaggcaaaacctcgtagattgtgttctgcagcaattcaaagattctttcttcactcattgtcagttcctccctgtttcatcttttatgaatattccatgttttcaatctatcatttcgtcttgtcaacacgtttgcagaaatgagcctaacttctgattcaaaagcgaggccgtctcttccataagacgaaggccgataccatcggcatggcggtttttccaggactccagctccgtacctttcacccattgattaaaggcgcctaatgccgggccgcaatgaatctggaagtctaccttggcatccgggtctcctttaatcgccgaagcagagctttgcctgaaataccatttgaatatgagcgccattttctgtttcggattccgttcggcttttgaaatgtcttcattcgaataatgagccttcactttgtcataaatactgcttacacttgccttaaaatacttctcttctatttgtctgagtgtcttttcatcaatttcttcaattgagcggtgacgctgatacagttcatgcagcttagaggcccgggtcggaaagaacagccctttctttaatacctgcaccttgctgcctgattcaaacatatcgccggccggcgcgtaggccgtgtcctgtacattcatctgctgcaggagatcctttacgaggccgctcgtcgctgcttcaacggtgcattggttaatggatccggtcacaataaaatcagcgccgagcataaatgcggccatagcagcctcaggcgttccgattccccctgcggctccgatgcggacggttttgccgtatcggtattttttcatcatgtcatctcgtaaacggatgatcgccggcatgagactgtaagcaactccgccgtcagtgtggccgcctgaatcagcctctacgcagatgtcatgcgcaacgggtatttctctcatcagacttgcttcttcagcggtaattttgttttcggctgcaagtttctgcagaatgtgatcaggcgccgggctgagaaatgcttccgctacttccggacgggacagctttgcgataatccgctgacgcgctattatttgtccgccggcaccgcgttttaaccccttagcgcgaaaccttactaaagcaggagtaaccgttaaaaatgctgatgcttccaagttctgaaccccatgcttcagtaaaagatcaatcattttttcttctgaatctgtatgcttcatgttatgtacaacatttatgccaaaggaaccgccgtcacgaagctcatgctgaattgacaaaatggcgtcctcaacgtgcgcgatgttcaaaccgcccgttccgaaaaagcccatcattcctttttcggccagtttgacgaccatttccttcgaagaaattccgcggtacatgccgccggccaagtaggcgtatttcaattgataatcgcgcttaaactcttcatttcctaaagactccgccgtaattgagctttttccagcttcagccgggactttgatttcatctgttatcggctccgcttcagccgtaattctttgaatcagccccgtcagcacttttccgggaccgatttcctcaaagatcatgttctttcttcccattaaaaaacggatgctgtctgtccagttcaccgatcccgttatttgtccggtgagtgtctttttcagctcggtctgctcataaggtcttgccgtcacatttgaaatgaccggaatggacagcggcttaaaatggaaagtttcaataaaccgtgaaaattcctccttcgcttccagcatgtatctggaatgaaaggcgccgctgacatttaagcggtgaaccatttttacgccgtttacggcttcaaaaacggatgcggctttttcaatatcttctttatatccggaaatgacaatttgctgcggagtgttcatgttggcgatatcaatcgtatgcaagtgatactcccttaaaacgtccgtcacctgctcatgagtcaggccgatcaccgctgccatgccgcctccttttgcgcggctcatcaggtcgcccctttttttgaccagctgtaggccttcttcaaaatcaaaagcgcccgaggcgtataacgcgttatattcgcctaaactgtgtccggcggtaaaatccggtttcaagccggtttcttctgtttttttcaaataactgagggcattgacgacatagagcgccggctgagtgaattgagtctgattgagacgttctccgtcccggcacagctcctgaatggaatatccgagaatgtgatccgcctttgcggttaattcaggatagcggccgaacaggtcctctcccatccctattttttgcgagccttggcctggaaaaacaaagctgatcatcttacagtctccttccgggcggtgataaaatgctgtcttctatttgctgcaaatgggtttgttctttatgaaacggcgtcataatggcacggatgcgttcagccgatcctgcgggaagaatctgtttggcaaatgcggccaacgttccggaaggcccggcatcgatatacaatcctttttggcggctgtctgcgaattgaagcgcttcgcggaattgaatcggctttcttacaatatcccagaaaaagtccgcttgtatatcggtctcagcctctccggtcgcactggagatgtacggtataaacggagtccggattaatttctgagctaaaaagcgcttgtacggctgttccgcctgatcaaccagcgctgagtgaaacccgtaagataccggcaatagctgatgaggaatctgcttttctctcagatcgtccatgatctttttgatatgttcccgctctcccgagatgacaaagtgagaatgatagtttacagatgccaattcactatgttcgccgagcagcggatcatcttgatataaagccggatcacccagtatcgcaagcatgctgccgttacggcaagtttccgtaatgattcgggcctgttccagcacgcaatctaaagcatcctcagcgctcagcacacccgacacagcggccgctgcatactctccaaggcttgctccgatcacataatcgggacgtatgcctctttgctccaaagcatatgcaagtgcgtactcagccataaaaatggcaggatggctgaaaagaaggcggtcaaatggatcagacagacgattgcctgtatgataaacctctttcaggacagagtaaccgaaacggctgactgcaaaatcgtccaagtcaagcattttctgccgaaaagcggcgttatgtgcaaacagctctttccccatttgatagtattgggaaccctgtccagaaaacatgaaaacaattggctggttcatttgttctcctttttgctctttatttttttaaaatattgatttgtaagtttttcttgatgttgtgtgcaggtgaagtggtcgtgatgttgtatggctggcactattatgtgagataagaattttgacttgcgttccgctacatggcgggtgaagcttcagtttcttttttgatgcggtgaataagtcctgtcagcacatggcccgggccgacttcttcaaattccatccgccctttgtccagcagatagcgcatgctgtcgttccatcgcactgaatggtcgatctgatcggccagaacggagtggattccgtcttgctcataaggcctggcatgcacattagaaatgacaggaattgatatagcagaaaaatgaaatgactgtaaaaatttttcgaactcttgttttgcttcgctcatatatctcgagtgaaaagcgccgctgacgtttaacggatgaaacatcgtaacgtcctttattccttcgaatacgcttttggctctttcaatgtcttctttgcgtccggatatgacaacttggtgaggagaattcatattggcaatatcaatcgtatgtaatccgtgcgtttgaagggcgtccgacacttgagctgcggttaaccccataacggcggccatttttccgtcagtggccatactcattaattcgcctcttttacggacaagctgcaggccggtaataaaatcaaaagcacctgctgcaaacagcgcattatattctcccaaactgtggccggccaaataatccggctttatgtcattttcttggatttttttcaaatagcttaacgcgtttacaacatataaagcaggctgggtgaactgcgtcttgtgaagattggaatacggattctcaagacaaagccgtttcatggaatatccgagtgtttcatcagcctgctccgttaagtctttaaattcatcaaacaatgagcttcccattccctgcttttgagaaccttgtccggggaatatgtatgtgatcattttctcagccatcctttctcggattcagttaagaagcatgttcaagttgatagtaacttcacaaaaataccatgtcaagttaatttatcctatgcggaatcctgaataatgcctatttttccctgacggaaggcggactcagggcttttggaatagacataagcagaatgtcccattcagcctgcccggcgcttttatccgcaaactaccgttactcagccattcatcaccaaaaagcgagcaatgactatcatttcaattcagaagttccgtggcctaaaagaaaaactagttagatagaaccaaattatacgctacttaaagtgaaacagccctttttgattttttctgttgcggaaattcacgaaatgttcttttttttcaatctgaaagtaaatattgtttttcaaaagactctccattttttgacccggcttctccccgaaggagtgccccggatacacacgcacatgcggcggaatagaggctttgatcctctgtatactgtgaaacatatcttcagctgagctgcccctgtcctcacatataccgcacccttctgtaaacacggtatcaccggtaaaaaggtgatcagatagcaaatagcacattcccccggccgtatgtcccggggtcaatatacttctgatgataaaccctccggccgcaaaggtttgtccgtcttcaagcgctattaagtttctgcaccggaattgatagaaatcgatttccgccgacgacatgtatatatcagaatgatagatttgctgaagcggctccgccaagtttacatggtcataatgcgaatgtgttaataaaatagctgataaatcaacatccaattcatgcagtttatcggttattttatcgatttcccaggacgggtccaccgctatcgcagatttttttgagcggtctgcgataatataacaatagttggaccacatctggtgataagttttgatttgatgcacttcatatgtatgatccattgtcaccattcccatttaaaagatccgggcagactgctgccgccgcccagccgactgtaaccactttaccagatggcaccacgtttttccatggattttccggtaaagtttaaaaaactttctgctcccgccaaaagcaccagtctgggccttttttacaaattgctatgctgatatataaggaaatcagaatattaattcagatgaattctttagggaattttattcagaaaatgaaggatgaatatgagtttcggataaaaagaaaacaaattgaacttttgttttgagaagcaattacagaagcggccggaggagataatcagtttttagaaatgacccgcaattaagattattatttcaatccttttcttcagataaactaaaccacacgggctctcgaaatatatcagaataccttagttcttacaccgaattcaacgttatgttgacattaacataattgaactgagaaaagtacagcttaatttacactctttttttttgcgagaaaaccgttcaaaaaccagtctagctgcaacaattcacgaaagcgtcgcgcatgaaaaaagacgtcagttgaagacgatttatatttgattattgacaaggagctcagatgtttttgttagggctaaataaagttatctttttactgtgtaaaaagtaaatattaagatttagacaaatagactatgtgatatgggtcggagtttactgttcaaggtgatttgtcctgagctataaaagcactgagagcagctcgggacgcaatacctactaaagttaaagctgctatgggtggaatcggcggttttgaaataattcttaatatcattgacaattttactggtgcagttgaagatgcgtgctatgcggatgctctaaaagtaactggtaaccaggcagcaactttgtgggttactaaaactcttatgcttttcctttaaatggggctattgttggtgtttaacaaatttatcctgtgttaagctttaaagtgattattttctaaagtgtttaagatcggaggtaactatggaagataaaagtaatgctgaaccgagcccgaaagctataagaattctaacttacatcattcctataattttaatagggcttatccttgtccttaagaatattaacaccgccgcagcggaaatttcattttatattgttgctgtcggtgtggttctcttagtggttttcagtttgatcaaaaatagaaaataccgcaggaagaactaaatgtaagggggctaatcactagtcccccttgactgacttgcggatagtataacccgccaaattccaattttatttaaattcttccccatctcttccctgtgactttgtaaaagcaggtacccgcatacagagtattcatcttgtacttcagggatccttcccaaataactggatgttaaacaaattatcttcatgatttacggtataccatgcaacaattatgccagaactcaaaagttatctctgaaaggctgggtcattcaaactagtaaggctgcttgtgggtaaataacagtttagtctcacataaacgttgttattacatcacacgcttaaacatcttctccatttcatacgtactgtggtggataatgatcggccggccgtgcgggcatgtgaacgggtctgtcgttcggcgcaggtcgtccaagagcgctttgatttcgtcgtttctcaaatggcggttcgctttgattgagcctttgcagctcatcataatggccgcttcctccctgagttttttaatatcgatctgtttggcgtcaagcacctgctgaatgatttcttcaatcagttcagcttcttccccttttggaaaccaggccggatggcagcggacgatgtagctgttcgtgccgaatgcttctaaaaatactccgacgctttcaagctcatgctgatgctggtcaatgatcagcgcttcatttgccgcataatgaaaggtgagcggcacgatcatatcctgcacttcaggctcgacctgcccgactttctcccggaaatattcgtatttaatccgttcttgcgccgcatgctggtcaatgatatacaagccgttttcgttttgggctaaaatatacgtcccgtgcatttggccgatcggatacatcaccggaactctttcttcccgtatttcttcagagtcagcctcctcttcaggctccggaatatcggaaacaggcgcttccgttaccggcatgccgagctccggcggcactccgtgacctgcttcatccggcagggactcttcttctatgaccggctccggctcttttacgaccgaactcagcttcatcggtgagtaagacggctccggcgttttttcaggaagtttccgctcaggcgcgctttcctcgaatgtcataaattgctgttcgtttttggccggtgccggcgctgtttttttcgggagctgggcgctcggaataagccgctgcttttgaaacacttcctttatcccgtcacggatcagctcatgcagctccgtctctttgctgaggcggacttcaagcttcgacggatggacattgacatcgaccaaaatcgggtccatcgtaatttcgataaacgtaatcggatggcggccgatcggcagaagtgtgtgatagccctcatgcaccgcttttacaagcgggaaattcttaatgtatctgccgttaatgacagatgacatatagtttctggatgcacgcgtgatttctggaagcgcgatgtagcccttgacttcaaaatcaagcgagctgacatggagcggtatcatttttttcgcaaccgccgtcccgtaaattgcggccagcacatggcgcacgtccccgttaccgtttgtctgcaacagatttttcccctgatggcggagacggatggatacttccggatgcgcaagagcaatccggttgacaacatccgtaatattgccgagctccgtatgcacggttttcatatatttcaatctggcgggcgtattgaaaaacaggttggtaacgataatctccgttccttttctgctggaggatttctgttcagaaatgatattcccgccctgaagaatgagatgggttcccgccccctcgccgatgctcgttttgatttccagatgagaaacagacgcgatacttggcaaagcttctccgcggaaaccgagtgttctcacccggaacaggtcgttttcatctttgattttgctggtcgcgtggcggcggaaagcccgcttgcaatcatcggtttccatcccttcgccgttatcgagcacccgaatcgacgaaagccccgcttcctctatgtcgatttcaatgactgtgctgtttgcgtcgatggcgttttccaccaattctttaacgactgaggcaggccgttcgaccacctcgccggccgctattttattcgaaagttcatctgacagctggatgacttttgccaagtccgtcacctctttctattttaattttttttgcagcttgtacatttcattcatcgcctcaagcggcgtcatatcgagaatattgattgacttaaaagcttcaagcacttgtttttctttattagaaacagccggtgccttctgttctttttcaccgtcagcaaaaaaggacagctgtgccggttcttctttgacggcgggctttttctcaggtgccgccggaagctccggtttatctcccgtctgctcaagctgtttcaaaatctcctgcgcgcggctgatcagatcgtccgggagctccgcaagctgggcgacatgaatgccgtaacttttatctgcggctccttctttgatttgatggagaaacacgaccgttccgttatattcctctgcgcgcacatgaacgtttttcagctgaggaagcttatcttcaagcaccgtcagctcatgataatgcgtgctgaatagtgttttagcgccgatatgatcatgaacatattcaataatcgcctgtgccagcgccattccgtcgtacgttgatgtcccgcggccgatttcatcaaacaggatcaggctgtcttttgtggcgttcacaatcgcgtttttcgcttccagcatttccaccataaaggtgctttgtccggaaatcaaatcatccgccgccccgattctcgtgaagatttgatcaaaaatcggcagaaccgcttcttttgcgggcacaaaacagccgatttgggccatgatcgatagaagtgcgatctgtctcatgtacgtgcttttacctgacatattcggacccgtaataaggagcatttcccgcgaatcgcccatcaggcagttgttcggcacgtattcttgactgtccatcaccttttcaacgacggggtgtctcccttcaatgacttttacttcattatcagaaaagacgggctttgtgtaatgcctgttttcactgatcgtagcaaagcattgcagcgcatccagctcactcatttgtttggcaagacgctgcagacgcggaataaattgtttcaccttttcacgcagaccggcaaaaagctcatattccagctcgcagatgttgttttccgcttctaaaataagcgcttctttttccttcaattccggcgtaatgtaccgttcggcgtttgtgagggtctgcttccgctcataccgcccgtcctcaagcagatgaaggtttgcttttgtgacttcaatataatagccgaacactttattgaaaccgacctttaatgaacggatgcccgtataagcgcgttcctgctgctccagtctggcaatccagtctttaccgtttttgctggcgtcacggtactcatcgagcttctgatgatagccgtctttaattaagttgccttcttttaacgataacggcgggttttcatgaagggcttcttctaacaggtcaagcaaatctccgcacggatcaatcaagccggcgcgttcttttgcttttttatggttaagagatcctacaagctctttaatgctcggcacttgttttaaagattctttcagctggattaaatctcttgcgttgacgtttccgaatgcgacccggcccgccagacgttctaaatcgtatacttccttcaggcgctcgcgcagatcttcgcgctcaaacagatgattgatcagcgtctcgaccatttcctggcgttcttcgatttgggatgccctgatcagcgggcggtcaatccattgtttgagaagccggccgcccatcgctgttttcgtctcgtctaaaagccaaagcaatgacccttttttgcttttcgaacggatcgtttccgtcagctcaagattccgttttgaatacaggtcaattttcatcgcttcttccaattcatatacttgaaccggctgcagatgatccaggctccgtttttgcgttttctgcaaatacgtatataaacgcataaacgtctctgtcagctcttcgcccggcaagtgctttgcgatttcaatgcgttctgttatttccccgtcttcgatagaaatcgttgcgccgcaccgttctttcagctgagcagccgtatgttcgttaaacttgcttgatacgacaatttcctttgcgccgactgagtaaatttctgacatgacatcttcaatccgctcaataaatacggccaggttttctccggtcgttaagtctgataaagcgagaccgtatccgttacgaaattcggaaacggaagcgataaagttgttttccgactcatggatgccttttccatccatcacggttcccggggtgatcagctggacgacttctctttttacaacgcctttagccgccttcggatcttccgtctgctcacagatcgccactttatagccctttttaatcagctgttcaatataagccgccgcggaatgatacggcacgccgcacatcggaattttatcagccgaacctccgtctctgcttgtcagtgtaatttcaagctcttgcgacgctttttttgcatcttcaaaaaacatttcataaaagtcaccaagccgaaaaaataaaaaggcatcttggtgctctgcctttatcttcaagtattgctgtatcataggcgtgtaactagccatcatttaatccctcactatgtatcttctcttatccgaatcccattataacataaacaaaagagtgatatctttatatataaaaaagagactcggggtgttaaactcccctagcctcaacttattcttcaggatctccgactaaaaattcagggttaatgtcctctaattcttcgtcaagatcgtcttcccaatcatcatcatcgtcttcttcccagtcaggattgacttcgacgacgactttcgtttcaccgaccacttctgctaaaaattccctctctgcctgaaccacgattttatttccgttaggagaaatggtgacttcaagacaattcggctgctgcagcactttggcaatgacttcgtgttcgtcatctaagtaatttgtatctctgtatctgagtttaatcacatcgacatactttactctctcggttacaacttccgtttttgtattatcggcgtaagagtaccagacgtttatatcataatacccttcaatttctacagtcttcccgatcttttcggcatcgtacttgtggttgataatccagccgcccagtatacttgacggtttttctccaggcgagatcgtgttggtgcattgggtgaattttcttcctttcgcaactaccgctttcgtaataatttccctgtattcagacattccggcaggcctccttgttcttcttcgtgttatcttatgctgggcatttgtctcatgtgcatttttataataaaaatataaaaatacaaagtttctgtttcattgtatgcagccctgcccagaaactttacttttaagtatgataaaactttccagtaaaaataggacaaaacgttgagacaatgaaaatttagtacatattacaattagttcttaaacggcaaaaaaaacacgggccgatgaaggccccgtgtttaaatagaacagctgttattcgaatgttttacttttgaaccggtttctcccgtcagcaggttgcctccggtagatgtaatgatttcgtttgtcacctgatttgagatcgtatgtgcgacaagctgaagaaggtcattgacctcaatctgggaatctctgaattcctggatgatcggaatcccttcaagctcttcctgcagggcgtcaattttactttccacttgtttcagcgcttcaagcttttcgtagtgcttcaggttaacggcttgcttttgcagggttttaatctgattaataatcgcagagactttttcattttcgttaatctgcgcctcggcgcgtttgaaaaaatcaacttcttctgtttcagaaatcattttcgcaaggttcctagcctgctgtacaatgtctttctttgagtaaagcgtcatcattatttcacctcgattgcttctcctgccatcacaccgtcaagcgaccatgttttcgcctgttcgattttgacgcgtacaatcttgccgatggcgtctttcggccctttgaagttgacgagcttgcttttttccgtatagccggcaagaatgtcagggttatttttgctttctccctcaactaatacttcgacagtcctgccttcatattccttcatttttttggctgaaatttctttcaccaaatcattaaggcgctgaagacgttctttcttgaccctcatcggaacattgtctttcatcttcgctgccggcgtgccttcacgaggagagtaaataaacgtatatgcgctgtcaaattccacttcgcgatataacgaaagcgtttcttcaaattgttcatccgtttcattcggaaaaccgacaataatatcggtcgtcagtgaagcgttcggcatcgccgctttaatttttccgacaagctccagatagcgttctctgtcatatttacgggccatcatttttaacatcgctgagcttcctgattgaaccggaagatggatatggtctaaaaggttgccgcctttggcgagcacttcgatcagatgatcatcaaagtcacgcggatgactcgtcgtgaatcggattctcggaatatcaattttacgcagttcgtccattaaatcaccgagaccgtacgtcatatcctcaaaatcttttccgtacgcattcacgttttgaccgagcagcgtgatttctttatagccttcgcttgcaagtcttctgacttcctggataatttcctcaggacggcggcttcgttcttttccgcgggtatacggtacgatgcagtatgtgcagaacttgtcgcagccgtacataatgttgacccagcctttaatttttccgttgcggactttcggaaggttctcaatgacatccccttctttcgaccacacttcaatgaccatctcttttgataaatatgcctctgataacagttccggcagacggtgaatgttgtgcgtgccgaaaatcatatcgacaaacgggtgcttcttaaggatgcggtttacgactgattcttcctgtgacatgcagccgcagacgccgagaatcaagtccgggttattttttttgagcgcctttaaatggccgagctctccgaacactttgttttcagcgttttcccggatggcgcaagtgtttaataaaataacgttcgcgtcatcaaccgaatttgtcgcttcataaccgagcgccataaaaatacccgccatgacttccgtatcatgctcgttcatttggcatccgtacgtgcggatataaaatttcctgccttcaccaaggcctttaaattcttcagagattttaaaatcgttatgatattgaacggattctttgccccgttttttcgcatcttttaaagaaggcggaatatatacggcttcaaaatacttgctgtaatccttttcggattttttgtccgccggattcacttgtccgctttcctgcttttgcttttcattcatgttcgaatgtctcctttcaaccgaaacttccaccctcaagtatactggttaaaagcgtttggcacaaccgccagcctattattgtacaccttattgagaataagaatcaataagaaataaaaaagagggaatcatttcccccttacacaagctgaagctcttttgcggctgaacggattacttccagggcccggtcaagctcctcttttgtatgctccgccgtaataatggtgcggattctcgcttttccttgggcgaccgtcggatacacgatgctttgtgcaaacacgccgcgggtcaataaaaggtctgataatgcctgggctttttcttcctcccctattaatatcggcacgatcggtgtttcgctttttgtgagggtcagccccatttgaaccagtttgtctttgaaatacgccgtgttctcccatagcttttccatatgctcaggctcttccagcaggacgtcaatggcttctatgcatgcggccgttactgcaggcggatgagaagtgctgaataagaaaggacgccctttatggcgcaggtaatcgatcagaacctgcgaccctgcggcgtaaccgccaagcactccgatggctttgcttaatgtgcccacctgtatgtggactcttccgtcaagcccgaagtgattaaccgtcccccttccgttttttccgagtacgccggaagcatgcgcatcgtcgaccatcacaaaggcatcgtacgcctctgcaagtttgacgatgtcaggcaaaggagcgatgttgccgtccattgagaatacgccgtcggtgacgatcaggcgcatgcggtaattcattgattttttcagcaccctttccaaatcgtccatatcaacatggcggtacacctttttatctgcttttgtcagcctgatcccgtcaataatggaagcatggttcagttcgtcagagatcacgatatcttcttttgtaagaatgcttgataagacgccctgattcgttgtgaaccccgattgaaaaacaagtgccgcttctgtttttttaaaggttgccaattttttctccagctcattgtgcattgtgaatgttccggcgattgtacggacggaccccgtacccgctccgaattcttccgcggcgcgtttggccgcttcgacaagtcttggatgcgacgtcaaaccgagataattgttcgatgaaagctgtatcacgttttcccctttgacttccaccgacggaccctgcttcgtttcaatttgtttcatttgctgccacgttttattttctttcattttatcaagctctgcttttagaaattcaaattctttcattatagaaccctccccttatggaatcaaaatgactttgccgcactgtccctttctcatcaggtcaaaccctttttcaaagtcttcaagcggaaactgatgcgtgatcaccggcgtcagatcaacaaggccggattcaagcaggtgcgatacctgccgccatgtttcaaacatttttctgcctgtgatgccttggacggtaagtcctttaaacaccacgtcatttgtcaggtcaaccgtcaccggacgttccggcagactcagcatgtggaaccttcccccgttggccgccatctttaatccttgtgttatggctgccgggtggcctgacatttcgcagacaaggtcgatcccttcaccgcctgttaaggtgtcgatcacctcaagcggatcttcctcatcaactgaaatggtgatcgcagctcccaatttcttcgcaagagccagcctgtaatcatttttatcaatggccgcaatacgggatgcaccggccgctttagccaccgccaccgccatcagcccgatcggtccgcagccgataattgcagcggaaccgcccgcaagccggctgctttccagcaccgtatgcaccgcgttgccaagcggctcttgaacagaggcgacggcggggtccatatcagcggggtttttccaaacatttcgggccggcactttgacatattcagcgaaggagccggctgtatctacgccgaggatctttgtatgggtgcacacatgatgtttttctgttaaacacgggacacaagtaccgcagacgaagtgggtttcagccgaaacgtagtcacctattttgacatttgtgacgtgcttgcccgtttccgctacgataccgctgaattcatgtccgaatacttgaggtgttttgattcgtttctgcgcccattgatcccaattataaatatgcacatctgtaccgcatatagatgcggcctgtactttaatgagaacttcattctcattaatggaaggtatgggaatttctttcagcgttgctccgaaagcgttttcatttttaacgatagctttcatctttcctcccaacatgtacactcctcctcgaaaaaacactgtaataactggattgtaacatgagataaaaaggaggtaaacaccagtgtccactcgaggaaaacaactgcttccgtccggaaaaatgggcgggattttttttgaatattatatgaataaagccatttatcatctcttcgtactatcaatataatattgtgagaaaatatgacagcaataaaaacaacctgctcgccttacgcaagcaggttgagaatgtacatatttttgtttttaacggggttcgacgattaacttaatcgccgttctttcttctccgtcaatctgtatatctgtaaaagccggaatacaaatcaaatctacgccgcttggcgcgacaaagcctctggcaatcgcaaccgctttaacagcctggtttaaggcacccgccccaattgcttgaatttcggcggctccgcgttctctcaatacgccggcaagcgcgcctgctactgaatttggacttgattttgctgaaacttttaagatttccatttctgctcccccttagttttacaatggataagtgagtgttcattagaacaatcattattagatgttgctatccaaaaagccatccccacaatgcttttcaaaaatagcgggctaccttccatttctactatattcactaagaagttgctatattcctgcttttccttttaatatttttataaaataaacacatgatcacctattcaaagaacatatggtcatcattgattaatatccgttcgatatttacggcctttttcgtttgatcgtcgatgtcaatgagcactccgctcagcgtagttttaccttccgccaccgtaaaccggacgggaagattggttttaaaccgcttgatgaccgtttctctgtccataccgagaattccgtcgtacggacccgtcatgcctacatcagtaatatatgccgttcctttcggcaaaatgcggttatctgccgtttgcacgtgtgtatgggtgcctaccacggcagaggctcttccgtctgtataccagccgatcgcaattttttcgcttgtcgcttccgcgtgaaaatcaataaaaatgtacggtgtgcgctttttcgcttcttctattaattcatccgctttagcaaacggatcatcaagcggcggaagaaacgtccgcccctgtaaattaatgacggcaagctcttttccgttcgatttaatataagtaatgcctttgcccggcgtaccttccgggaaattcgccggccggacaagatgcggcacatcatcaataaagtcgaagatctctcttttatcccacgtatggtttcccattgtaatggcgtcggctcccgcttccatcaggctgtggtagatcttttccgtcagtccttttccgtgtgctgcattttctccgttaataattgtaaaatgcggtttatgtttcgctttcagtttcgggacatattcttttaccatgtcgcggcccggggaaccgacaacatctccgataaataaaattctcatacattccattccttccttttcagggactcaaaaaaataaagtgatgcgctaagcatcactttattttgcatactctacggctcgagtttctctgatcacggtcactttaatgtgtcccggataatcaagctcgtcctcaattcgtttacggatatcacgcgccaaacgatgggcttctaaatcattaatggagtccggcttcaccatgatgcgaacttcacggccggcctgaatcgcaaatgatttttcaacaccttcgtaagactcggagatttcttcaagcttttcaagtctgcggatatagttttcgagcgtttcacttctcgcgcccggtcttgcggctgacagtgcatcagcggcagcaaccagaacggcgataatggaagtcggctcttcgtctccgtggtgtgacgcaatactgttaatgacgactggatgctctttatatttggtcgcaagctccactccgatttccacgtggcttccttccacttcatggtcaattgcttttccgatgtcatgcagaagaccggcacgcttggcaagctttgcatcttctccaagctcggaagccattaaaccggctaaaaacgcaacttccatagaatgtttcagtacgttctgcccgtagcttgtacggaatttcaaccggccgaggatcttgatcagatccgggtgaagtccgtgaacgccgacttcaaacgtcgtctgctcacccatttcccggatatagtcatcaacctcacggcgggatttttcaaccatttcttcaatgcgcgccggatgaatacggccatcctgaacgagtttatcaagagcgattcttgccgtctcccgtctgatcggatcaaatccggaaagaatgactgcttcaggtgtgtcatcaataatcaggtcaatacctgtaagcgtttcaagcgtacgaatgttacgcccttcacggccgatgatacgtcctttcatctcatcattcggaagattgacgaccgataccgtcgtttcggcaacatgatctgctgcacagcgctgcaaagcaagcgacagaatgtttttcgcctttttatctgcctcttctttcgcacggttttcggtttcttttgtcatgatggcgatgtcatgtgaaagctcattttcaacccggtcaagaatgatttgtttcgcttcatcccgtgtcaggctcgaaatgcgttcgagttctgactgctgcatacgaatcatctcatccactttgctttccatctcttcaatatgttgttgtcgttcattcagagaatgatctttcttctccaacatcgcttcccgtttatcaattccttcatgtttacggtcaagattttcttctttttgaagtaaacggttttcttgtttttgaagctcatttcgtctttcacgaacttcctgttcagcatctattcgaagtgtatggatttcgtcctttgcttcaagcagagcttcttttttcagtgcttcagcatcacgctttgcatcttcaaggatttgctcggcagcaccgcgtgcgcccgcaatctttgcttcggcaatggttttacgaacatagtagccaacaactaaaccgagcagagtcagcaaaatggagatgagaaccgtcattggggtcatactttcacctcctcttgctatgaacttggtttttgcttaaataagtgccggcatgtacattgtctgattttctcaacatacagaaccttcacagggaatgagtctctcatgcccttgtcaagtttaaatggtttaacaatcatgttaaaaaaacaaatgttacaacttcattgtaattgtgtcggaaatacttgtcaagcttgccagcttaacgattcgccttcagctcggatcgccgcccatgtatatatcataccataccttcatccgcttttcgtgaatgacggctctgtcagtccgcctggttaagcaattggtaaattctattgtttacctgtcctaatttggcgttattctgaatgtttgacagtaatatgacatatttgcttgccgaatggctgaaactgtttaaaatgttgtaaccgggcataacaccgtgattggaatagctgcccggatcaatgtaaaaccccatcccgtaagcggcactgcttcctgctgtaaacatttttgtgaagctttcttttgaaaggagcgtgccgtttacgatcgctttatcaaatttataaagatcttcagcgctcatatacatgtcgcccgccccgtaaagctgcgataagtccaaaaggtgcggcgttacaagactgccgctctcatcgactttgtagccgacggcaggatatttggcttcagcaaatgttttgtaaaatccggcatgcttcattccggccggtttgaacacgtgttcttttatatattgttcataagactccccgctgacctgagatgcgatataagcaagcactgaatagttggaatccctgtaatcccaaaccccgggctgccttttaattccgcggtattctatatccttgattaaatcaattggagaaatcggtccccgaccctcaatatgcccgtttatgccggacgtatgattgagcaggtttttcaatgtgatgcgcgtgccgttaggaaaattcggcaagtatgtactgacggggtcactcgtctgcagcagccctttttcttcaagctgcaggacagccgtcgcgattaacgctttttgtgaagaaccgatataatatgatgtctccggattgtttttaattttttgttttcggtctgcatagccaaagccttttttcagcacaacttttccatcttttacgatcattgctgtgccgctgaacccgatctgttgcaagtaattgctgatctgtttattgtgatcgattgatttaggtgttttctctttttgcgtcttttcttttttctgttgagtctggtcttttgaagtatcagattgagcggcgggagcgtttttaacggattccttctcccgatgatgcgctgtgacggtccagatcataataaaaacagtgacaagcagcagaaaaagaaacagccctcccgttttcatcagcttcttctttctttttttatttattcttgtgcggcgggggctcgtcatcttttttcctcctcagatataatttcaactttcgccatgatgttagacgagtgaagggtgaaaaaagttgtaacattccagataaaattttccgaaacagccagtgtttttttgaaacatacaaaaaaaagagcggaaattgcttattccgctcttttgatcgtgtttttattcttctaattccatctcttcctgaacttcttccgctttgtccgttacaccgttattgtctaaaccgtaatattcacggatttgttcctgaatcatcagcatgatgtctttattttcttttaagaactgcttggcgttttcacggccctgaccgaggcgttcttcttcataagaataccacgaaccgcttttttgcacgatatccagttcagttccaaggtcgatgatttccccttctttggagattccttcaccgtacataatgtccacttcagccgtacggaacggaggagcgactttgttttttacgactttaattctcgttttattccccatcacgtcgttgccctgctttaattgctcggcacggcgcacttcaagacgcacggaagaatagaatttcagcgcgcggccgcccggtgtcgtctccggatttccgaacataacgccgactttttcacgaatctggttaataaagattgcgattgttttagatttattgatggcgccggaaagcttacggagcgcctgagacataagacgcgcctgtaaaccgacgtgtgaatcacccatgtcaccttcaatttcagcttttggaacaagcgccgcaacagagtcaacgactacgatatcaacagctccgcttcgcaccagcgcttcagcaatctcaagcgcctgctcccccgtatccggctgagaaagcagaagctcttcgatattgacaccgagcttttgcgcgtaaacaggatcaagagcatgctcagcatcaataaatgctgcctgtccgcctttttcctgaacctcagcgattgcgtgaagcgctacagtcgttttacctgaactttcaggtccgtatacttcaataatccgtccgcgcgggtatccgcctattccgagagcagtatcaagtgcaagggagccgcttggcaccgttgaaattcttgtatccgttttttctccgagcttcatgatggaacctttgccgaattgtttttctatttgcttaagagccatatctaaggctgcctgacgatcactcatttattttttcctcctttatcttgccactacatatactataccttgtttactggcatttgccaagaaaaaagcgaacgcatattcggattttttccgcgttcgcttttctgcaaaagagcataatttcccttatgaaacttaaaaatcagagaaaaaagctctttaaaactttatttttgatccagcatttttaaaatgagatggcagccgtatttagcggcgcgctttctgattccggttcttgagccggcaaagtgaaattcgtgcacctcttcttttccttccgctgaaatgccgataaagacgcggcccggcgcatgcccttcctgcgggtcgggacccgcgaccccggtaaagctgatgccgatatcgcttccggtcagctttctcacaccggatgcaagctctttcgcacactctttgctgaccgctccgctttctgcgagcgtctcagctttcacgccgagcacatgctgtttcacgctgtcggaatagcagacaacacctcctgcaaatagttgagacgcaccgcttaaatcagtcacccactctgaaaacaagccgcctgtaaagctttcggcagaagaaatcgtgattttgttttgtctgcatgcttttgaaagctccttcaccagggacgtatcatcatatccgtagaaaaattcaccgacacgttctaaaatggcggcttccgtttcttttaaaagccgttctgtttctttttcgtcagcatgtttcgccgttaaacgcagcgtgacctcgccgtcagcagcaagcggcgcaatcgtcggattcgtctgcgcgtcaatgatatcttctaaatcagcttcaagctgggattcaccgattccgaaaaaccgcagcacggttgaaacgattttctcattagaaccaagctttttaagaagcagcggtttcgcttcattttcaaacatcggacgcagctcgctcggcggcccgggaagcagcatataaagccttgagccgtgctctgcaagcattcccggcgccatgccgaaatgattcgccaaaacgtccgagccctcaatgacgagcgcctgtttgcggttattcggcgacatggtccgttttgttttcgcgaaatattcttcgatcgaccggaacgcttcgtcattcagaacgagcgggcgccccagtgtgtttgcaatggtttctttcgtcaaatcgtccttggtcggtccgaggccgcctgaaaaaataatcaggtctgagcgctcttcggcaatgcggatgacttgcttaagccgctccggattgtcaccgacagcggtatggtaaaacacgtttacaccgatttccgccagttctttactgataaactgcgcgttcgtattggcgatctggccgagcagaagctccgagccgaccgcaatgatttctgctttttttgctatttccatctttaagtccttcttccttagttagatgtttttaacgcatcccagttcttcgcaaaataatcccagccggaaatgactgtgaagagcacggccacccataaagcgatatcgccgaacgggaaagaaacgagctcaaacggaagattatgcagcaaaagcgcggcaacagcgatgatctgggcccatgttttaattttccccagcatattggcggctacaacttcccccgttcccgccagcacaagtcttaatcccgttacggcaaattcgcggctgatgatgatgatgaccatccacgccggcgcaaggtcaaattgcacaagcgtaattaatgccgcggacaccagcagtttgtcagccagcggatctaaaaatttcccgaagtttgtcacgaggttcagttttctggcgtagtagccatccacccagtcagtcgttgatgcgataatgaacaaaacagctcccgtaagatgcgcgaccggaatcgattcatcccctatatgaacgctgccccaatgaaaaggaacaagcatgataatcataaatacaggaattaaagcgattcttgccagtgtgattttattcggtaagttaaacataaagcccctccaataatatgtactcggacgtgaagaaaaagtcatcttaatcgttcagatgactttttccccttttattttttcatcttgattgtgatggtctgcgccatcatatcatgcggattgagttcataggacagaacctctccgttgattttaattttcaggttaggggcatagcccgtgcggatttcaatctgcttttgatccgtgacgtcttttttaaaggtttcgcctttttgcagcgttccttcttttaaagaaccgccgctgtcatcacggacgcggatccatgcgctgtcagaagcaatcagttcaagcttatacttatctgccccggagacgttgtatgaagaagccgagccttccgttccggccgctttgatctccgtcttttcactgcttttttctttctttttctgctctgacgcttttgtgtcttttttgctgtcagattgcgcttcgtcgtttgtattgccgtcgtttttcagcgcagaatccttaggaatctcatacttgctctcactttgggtgacggccttatctccgtctgtctgcccggatttgctcattccgaactgaataatcgcataaatgatcgcgatgacgataatgacaccgatgacgacaaggacggtcggaagccattccgccgcctttgaagcggacttaggaagctccctttgcatggcgagaccggagattttttccgacacatcgtcatggtacgtgttagggatgtcttttttatattcttcgaataactgatctgaatcaagcccgacagcttcagcgtactgcttgataaacgcccgcacataaaaattgccgggaatgacgtcataattgccttcttccagagcggttaagtatcttttctgaattttcgtcgccgcctggagttcatccaatgacatccctttttcctctctggcttctttaagccggattgctaattctgtcacaacaaacaccttccaatattaaaaatcaaagcttgaaaaaccggtctggtcaaacatttgcggttcttctgcatgttcatatgtaatgacttcgtcaggatcatttctgagttcgataatataatcgaaatcatcgagcgtatactccgaattttgaacaaaaatatcggggtgctccacgacctttgtcgccggaagccgcataatttcactgacgagctgaagatggcgctcagatccccgtcttgtcgaaacgatgccgtcgaggataaacacgttttccgtgctgtattcatcggcaaccagctggctccggatcgtttgttttagcagcgttgatgatacgaaaagccatcttttgctggcacaaacgcttgacgcaacgatggactccgtctttccgaccctcggcattccccggattccgatcagtttgtgcccttcttttttaaacagctcggccataaagtcaaccagaagaccgagctcgtccctttcaaaacggaaggtttttttgtcatcggcatcacgctgaatgtatcttccgtggcggactgcgagacggtcgcgaagcctcggttctctcaacttcgttactttaatggtctccattgtttttaaaattgattccaatcgtttaatttgatctatatgccggcatctgagcagcattccccttctggaaaggtcgacaccgttaattgtgacaatattaattgacagcatcccgagaagagatgaaatatccccgagcaggccggggcggttcacttgaatttcatattcaaaataccattcgagctttgccaaatgatataccccctccattgtggcaaatttttaccttcctttatcataaaacatttttctctaattagaaagaagaatgttgctctatagaggaaaacataaaaaaagagaggagaaatcccccctcttaatgagtgctgttattttcaacaagcttcaccatcatatttgcgatggcgcgctgttcatcttcagaagcaacgctccaaagatcagcaagcactttttcctgatggtttttcgagtcgacttcgttcgcaaggtaaccgccgatttctgtcgcgaggtcagtgatcgtttcatcactcatccctttttcctgcgcatagttcaatctgtcgccaaggaaattcttccaattatcccagttttctaatactgacatgttgggttcctccatttcatctgttgttacaaaattattttgtccgtgcagatgcaaactatacacacatttttttcagcagtgccagccgccgtttacggataatatatgccccgtaatataggaagccttgtccgataataaaaaggccgccgcttcggcgatttcctccggcttcgccagccggcccgcgggaatttcctctgccaacgcttctttttcatcagacgtgaactgatcaagcatatttgtatcaacggcacccggcgagaccgcattcacgcggacgccgctcggagcgagctctttggcaagcgctttgacgaacgaatgctgcgctcctttgaccatgctgtataatacctcgcacgatgcacctgtttctccccagacggaaccgatcgcgacaatgcccccgctttttttccggatcatgccgggcaccagattacgcgccaaaagaaacggactcgtcacatgcagctgcaccatctcccgcgccgtgtcatccgtaacgtccgtaatcaggccgaaatgacttttgccgctgtttaatatcagagcgtccacaggctgcttaacggaacggctgagtgtctccgcgccatccggtgaggacagatcagcctggatagcggaggcttttacgccgaatgatgcgctcagcctttccgcaagcctgtgtgcggcttccttattagaatgataatgcaaaaggacgtcatatccgttttttgcgaggacttcacttatactttgtccgattccgccgcttgctccggttacgagcgctgtctgtttcatcaatcaatactccttctttccccagaaaaacatccctcagggcgtgagggatgttttgttatgattttggcacgactttgcagactgtcagcctgtcttctgatatttcttctttaatgacccgctttacgtcttccagggtgatctgctccagtacggttacgacatcaaacagactcatatctaaaaaggcgtagcgtgtgaattggttggcgatgtattcaggcgaattgagcgcttttaaaaatgacccgatcttcttttttctcgcaaggtcaagtttttccgcagttacggctgattctgcatcaagcagcatctgttttaattcgtcagcgagcttatccggctctggtgtatctcctccgacagaggcaaagccgaatccgtattcagccgtgtaatcaaagctgaaggtttcatcaatgtagcctttatcgtacaagttgccgtaatgcggtgagctttttccgaagagacattcaagcatgaggttcatgctgagctcgtgcttcaacagctcccgccccgttttataagggtctttcgcctttaaaccgacaagacattttgagccttgcacgttcatttttaattcctgctcccggcggaaaaccgcttcctgctcctgaacctctttacgtttgatttcaggctggtctgtaaacggctttttctcctggtttttccgcacctggctgatgatcgcttcaggatctgcggggccgacgataaagagcagcatattgctcggatgataaaacgtttcgtagcactcatacagcagatctttcgtaatatgagagatgctctccaccgttccggcaatgtcaatttttacggggtggtctttatacatattttcgataaggccgaaaaacagccgccaatccggattatcatcatacatattgatttcctggccgatgatgcctttttctttttcaactgatttttccgtgaaatacgggtcctgaacaaaatcaacgagtgtttccaggtttttctctacattagaagtgctggagaacagataagcggttcgtgtaaatgatgtaaaggcatttgccgacgccccctgcttactgaagtcctgaaacacgtcgccgtccgctttttcaaacagtttatgttccagaaaatgcgcgattccgtcaggcacgtgtaccatttcttccttatttaaaggaacgaattgattgtcaatggaaccgtactttgtcgtaaacacggcgtatgttttattaaaaccctgtttcggcagcacatagacatcaaggccgtttgccattttttcatgatacagcgtttcctgaagctgttcgaaatttatcggtttagtcaagatgctccccccgtcccttttaagaaataagtcgtatccagcttaatgttctttccgacattgataatgtcctcttttgtcactttctcgatattgtcgaggaaagtttcgatcggtatttccacttgggctgaagcctgctgatacagaaattccgctaagccgtatgccgtatcaatcgtttctaacacttggtttttaataacggctttcgtttgggcgatatcgtcctctgaaaagtcaccgttttgcatagcctgaaattgttcttcgataatggtgacggcctgcttataatttttcacctcaatgcccgacatgaccatcaaaagccctttgaagctttccacccttgaggctgcataataggcgaggcttgctttttcacggacatttataaacagctttgaatgagagaaacccccgaacagcccgttaaacacctgcaatgccggataatccggatctgtatatgtcgtattggtccggaatccgatattcagcttgccctgcttgacgtcctcttcatcaatgacttccttcggatcgggctgttcattcgtcttgcttctttcaaaaggctgcagctcccgttcttccgttttaaaatacgtatcaacggccgttttcacctgatctgaatcaacatcgccgatgacgtacaggtccagctgatcttcgcgtatggctttttgataggcttcatacaactcttgcggtgtaatgtgttcgacatcatcgaactcgccgttgacgtgaagggcatacggttcgcttttgcacatttcctgaacgagacgcagattagaatatctcatcttatcatcatatacggcttgaatccgctgtttcagcgtccgtttttcctgcgtgacataaaggggcaggaaggcgccgttttccaaagcgggcgaaaagacaagctctgataaaagctgaaggcctttttccaataacggtgtgcggtccttcagatacttttcgttaggaatctcaagtctgaacgtaatgacatgacgttctcccttttttgtcagatcagctgaaacggatgtgccgtacagctcatcaaaataagaacgcagatcagcggttttcgggcggctttctgttccgcgcagaagcacatgcggaaacagcgccctttttgttacgagctctttcgttaaaggagccagcattttaaacgtcagcgaaacggttttaaatttctcagtctttacgatgtgggcggtgatcccgccgtgctttgacttcatttcatttacgtaagtcatgtgaaacctccttcgttcattctttaatagtatgtattatggccaaatttcaggattcgcaaaaaagagtgcgcagatgtaattatatcaactggaggatttataaggaaacaaaaaacctctgcccgaaaacaggcagaggcattgaacgttattttttcaaattgaaaggccaccagttggctcttccgaatattttcaccatgaccggcacaaaaaacggaaggacgacaattgcgtacatgagaaggcctgttaataccacggttgcaatctgtaataaggaaagaacgcctgacggcagcatggccgcaaaggttcccgctaaaataatcgccgcagaaatgatgacggaacccatatttttcatactgctgatcattgcgggttccgttccttcttttttcagctcattaaagcggtccattaaaaagatggaataatccacaccaagagccatcaaaatgacaaagccgaagaacggcacggcccagtttacgcccggatacccgaagaagtgtgtaaagatgtattccgtcacgccgatggatgcgaaatacgtcagtacgagcgacgccactaaataaacaggcataataagagagcgcagcattatgatgagaatcagaaaaattcccgccagcataaacattgccgtccgtttgaagtctgaatccgatacttctttcagatcggcattcatgctggagactcccgaaacgccgaaagaggcattcttcagatccgtgttcggaatggctctttttacgctcgctttgatcgcttgaatatcttgaatggccgtatttgagtaaggattgttatcaagaacgacggtcaattctgtcgtttttctgtcatctgacatgtacgtattaaacacgcttgtgaaatcactgtttgtcaacgcgtctttcggcacaaaccagcctgtcatttctttatctgaggccttgtgaagctcacccaggtaatcattcgcccccatcatgccgcttgatactttcttaagcccttttacactatcgttaaggcctgaagaaagatcgctgagccgggaagaaaaatcaccgagaccgctcttcatttttttctggccctccgcgagctgtcctgccgccgattcaaggcgcggcatttgtcctgcaagagccccctgtccgtctgacacttgctgcagaccgttttcaatactggtcagaccggtgatcattgcgttaatttgagtgtcgatctttttttgagcggctgccagccgggcaaattgtttttccgcttgctgcagatgatccttttgactgtcgacctgtttagaaaacgcttctgcatccgcgtttgccttggaaacggctgactgtacacccgtaaaggccgatttgatttctttgtaagagggatcggttttgactgacggtattgacgcttccaattttgcaaacggcagccgggcaagctgcttgttcaaatcggcaagctgtctgctggtttcatctttcatcggcaggacggtttttaccaattttaaagcgttttgcgtttctgaagcgagaccgctgttttgtttgagctgtgaagtcagcatttgtttttgctcttcaatctgctttctcatctgggcgacgccggctttattctcattcacgcctgcctgcagtttattcaggttttcgcctatatcagaaagcccggatttcagagacaatgttccgttaataagctgattgacgcttttccccgactcttcgatctgcggctgtgaatcagctaacgactttgcggcatgccctaatccgtccgtgattttttcaagtcctgtattgcctttatcaagcccttcttgaagctgctttgcctgatttgtgacaaataattgattcaatccgtttccggcagggcgcgtggcgcttctgaccgtttttacaccctctgttttttcaagttctctgctgattttttcgatatcaatcaggtgtttttcggtatttagaggctcatcatttttgatgacgactgtggccggaagaagctcccccgggccgaatgcgtctgaaatcgtattaaacgcgcggacggattcatatttatccccgatttcgtcaaggctgttgtaagatagcgatcctttgtaaagaaggatcggcgggacggtgaataccgcaacgattgcaagactgatgagcggccttttaaatgaaaaccgccctgccgtttcccatgctttactttgaggatgggaaatatcacccttaacgggccaaaacagtctttttcctaaaacagccataaaaaacggcacgatcgtcatgagcgcaagcagcagcaccgcgacaccgactgcaacggcggctgccgactgatacagcttaaatgtcgcaaacccgatgcaggcaaatccgatcagcaccgcaccgccgctgtacaaaaccgtctttccggccgttttgtaggtgacgacgatcgcctctcttatatcagcgccatgcgacagttcttctttaaatctgctgagaagcagaatgcagtagtctgtgccgattccgaacataatcgcaaccatgaaaatctgcgtaaaagttgagagcggaaaattcagctggtcgactaaaaatgcgacaatcgactggctgactaaataagatatcaatacagataaaagcggcacaaacggagcgaccactgaccggaatacaaggatcagcacgatcaggataaaagcgaccgttatatattcagtctttttcaatccgtcctgtgagctttttaacacatcttcatcgatcagcgactggcctgtaatgccgtatgatacgccgtacggtttcagctctttatcaattttatttttgatttcgaggatatcgtttttggatgtatcaagctgcagctgaacgagcatcgtttgtctgtcttttgacagcagctgttttttgatgtcgtcatttttctccccgaagtatgaagtcaccgttttaatctgaagcgcttttttctgttcagacaaagtgctgacggcttcttccagacgatcttttttgtctgtcattaagcctttttcgtgaaatacgatgacggcagaagaagacggtgcatctgaatcagacatttcatcaagcaattcatgggcataagaagaggaatatccgtccggtacggaaatctgccctttctcccgtgtcaattcagccatatcaggcgctgtaagcataaatatcaccgttgcggcgatccataccgcggcgatgatccagcgggctcggataatgtttttcattatgtctgctgatcctcctctgtcatcatcaatcgatataatttttcatatgtattaacgaacatctccgcctcgtcttcatcaaaatacataatatatgaacggacgagttcctcaatccgccgctccacacggtgaaatacttccgtccccttttccgtgacatttaaaagtatgctccggcggtcgctttggctgcgttctctattgatgtagcctttttcatacaggcggttcgtcatcgatgtaatggcgcttttgttgacgtggcacaccgcggccagttcaattgatttgcaatccggattgagcataatatagcggagtatgtaatattgatccaatgtcagctctttgttcactttttcagcgataatgctgtcaattttttttaagacgtgcaggtatacatcggaataacgctgaatcagctgctttactttttcttcatgcatcttttccccctccttccaatagttaaaatgtttaactattaaaaaggataacgacttgacgatatcatgtcaatcttcaaaataaaataaaaaaagacagtgcagattacaccgtctttaatgattcctttttttcttttgcttgtgatgagatatttaacagcgctaaaaatacagacacaatgccgcaaaaagcggataaaataaaaatcagccagcctgcatttgacatcagggcagcaaagatcggcggtcccgcagctactccgataaaccgcatgctgttataaaatgaggtgatggttcccgattcctcgttgtctacgccttctgtgatgacagcgtctaatgccggtaatgctattccgataccgataccgctgacacacaaaaagataaataataaataaaaactgtgattccaccataggccgataaacgacagtgtcacggcactcattccgaaaacgatgcagaacttcattttgccttggtctttcccgatttttctgcctgatatatatgaactgacggatagaaataaaagcgggattgccaaaagcgctcctttagccacaccgtcaattccgtatttcttctccagtgagtctgataaataaaaaagaaccccgaacagcaaaaacataatcacgcagccgatgataaataccgtaaagagccagcgtccgtcacgcttaaatatgcggccgacattttttacaaattcggaaatagaaggggcttctttttgtttctccggctttgccaccaaaaacaatacgagaaaaaaactgataagcgaaaaaaacggaatgaaccaaaacggcataaaccaaaaccatgcagccaagagcgacccgagaatcgggcttaatactttcccggccgtgtttgacgtctcaatgtcgccgagccccgcggtaatccgctcatcatcccctttgaataaatcaccgataaacggcatcactacaggagccgcccctgccgaaccgattccctgcagcacccgccccgccaagataatgggataaggatgcttgaacgcggtggaagctatcgcggcaagcgctccgcccgcaccggctatgagaagacaaggcagaagaaccttttttcttccgaatttatcggacaaatatccggcaatcggaatacaaataatcgccacaatcgaatagaccgttataattaacgatacttgaaaagacgatatggacagcttcttttcaatcatcggaagcacaggaatcagcatggaattcccgagtgtcatcacgagcggtacagaagccagagcaatgatattttttgttccatttttcttcttactcaacttattcacccattcactatacttggttgtttcctgttttattgtgccttgcggaaaacaaagtatgtattgaagcggcaaataaaaaaacagacacatgacgcgtctgtcttaaaaacgttttcttacaacatgaaaactgaacttatcagcccggaaataatttaatgaatacagcacaggttcatcattctgattatagtgggtttgcttcagcaataaaagcgccgtctccggctcgcactccaaaaccggtgaaatcgtatcgtgatatccgatcggttcgatatcggcaacggcatagctgatcacagacccggagtttttttccaaaagatcaaaaatagattcctgttcatgacagaaagaattcggcagaatgtgcatcggaatcgtatctaaacagtaaacgaccggagtgccgcttgccgttctcacgcgttccaaataaaaaagctcctgctcaggctcaagccggaatctagcgatatcttcctcagacggcgtgatgacctgagacgacaaaaaaatcgtacccggcaccatgttcgcctgctgaatcattttcgtcacgctgttgagctgttcaatacctgaaagaaacagcggttttgtatggacgaaagtgcccacaccgtgccttctgataatcacatgctcctcttcaaggatacgcaaagcttcacgcagagttgcccggctgacacccatagattttgaaagctcaaattcagaaggaagcttttccttttcggtgtaaattccgttttgtatatcctctttgattcgctcaatcacttttaggtacaagtgacgattgtcagcttttgtagacatgtttcccctccgtaaaccactttcataaattattgaacaattgggacaactatatcatgttttaataaaaaaataaataggaatgattttggtgatatcattttcagtgaaaactctctcctttttaagaagagagctcatcatattgttccttagataatagtacttccctcggtttgcttccttcatacggcccgacgacgccccgttcctccattgcgtcaatcagacgggcagctctcgtatatccgattctgaaccgcctttgaagcatggagactgatgccgtctgcatgccgataatcaaatcgaccgcttcgtcatagagatcatccgttacttcactgtgtgtttccgacacttcttccggaatcatctcttcttgatactgcgctttttgctgcgtaatcacatgatcgacgacatgctcaacctcttcatccgataaaaatgctccctggacccggacaggcttattcgcgcctacaggcagaaacagcatgtctccgcgccccagaagcttttcagcgccgcccatgtctaaaatggtccgtgaatcggtctgagatgagacgctgaaggcaattcttgacggaatgttggctttaataacaccggtaatgacatcgactgaaggccgctgtgtcgcgataatcaaatgaattcccgccgcccgcgccatctgtgaaagtctcgtaattgaatcttccacgtcggaagaagcgaccatcatcagatcggcaagctcgtcaacaatgacgacgatgtacggcagctcaggctgcttgacttcttcttcggcatttgaccgcttaatatggtcgttatagccttctatatttctcgtacccgtatgggagaacagctcatagcggcgctccatctcattgacgacctttttcaaagcctgcgaggcctttttcggatctgtcacgaccggcgcaagcagatgaggaatgccgttatacacattcagctcaaccattttcgggtcaatcatcatcatcttcacttcatgcggtttggccctcatcagaatgctcgtaataataccgttgacacagacgctttttccgcttcccgttgcccccgctacgagcaggtggggcattttgttcagttcggcaagcacggcttccccggaaatatttcgtcccaagccgatcagaagcttcgcgtccggcttgtcattgagcttggattcaagcacttcttttaacgaaaccatcgcaacttcagcattgggcacctcgatgccgattgctgatttgcccggaatcggcgcttctatccggatatccttggcggcaagcgcgagcgcgaggtcatcgctcagattcacgattttactgactttgaccccgacgtccggatacacctcatattttgtgaccgccgggccgagatgaacttgggtcactttcgcctttaccccgaagctttgaaaggtccgttcgagttttcttgcattctcgtaaatgtttttcttatcggtctgctggccggtatgtttcgggtcagccaggatgtccaatgaaggcatttgataatctttattttcaagctctgtaaacgtcatcggcggagccgcagccgtttcgtcactgtcttgagcgccgccggaaggctcatcttttgccgtttgcgccgtctcctgcgttttttccggaatcagcggttcgacgcgttcttcctgacggtctgaaaagcttgaaataatcggctctgaatggatgatcggcgaaatgatttcctcatcctcttcttcgggctcaggcatttcttttttcttctgaacccgtttttgttttttgcccgatttggtttttgttttcggcgaagacatattcgttctgaccgttttcatatcctcaagaaatgcctgccattgaccgcggataaaccggccgacggggctcgtccactttttgagcgtttcctgcagtgaacgccccgttacaagaatcagccccattaagatcagcacgatcgccatgatctgtgaacccgttgatgcaaataaaaagtgggaagctgcaaacagcaccgcgccgatcatgccgccgcccaaatcaggggaagcagcctgctgtttcatgtcaatcataaacagctcccacgtgttgccgatgacacttgccgaccgaatcgacccgtgatgagacagatttttaaagagctgcacgtgagacagcagcaaaatactggcgataatacagtacaaccctgcctttctcctcgttaaaaggcttggactcttctttttccaaaacagcgaaattccgagaaggaagagcgcaattaagcataaaataaaccactctccggcaaaaaaacggaacaagtacacaaatgtctgtcccacaacgccgagctgcaaaacagcaataatcgagattgcaacacagagcagtccgcttagttcgtattttagattgagcttactctcttgtttctttttagatttccgttttttctttgccacactcatcaccttactgcgttaaaaaatgtaaaatcatacatcatgaagaaaagcagccttttgccggctgcatttttctgtaggattcccctattatagcatattttgcccccgagaaacggactgaatgccggttagattttcagcttgattttttgtcccggagcgatgtccggattcagaaaatccatcgggttcgtacttaaaatctgtacgacttcagcttcatttcccttcatctcaaccagcagcggcacgccggcgtaatctacctgttcatgcacgctttgctctatatcctgaccgtaaacgacttcttgtggcatgacggtataaaggatcattgaatcatccttccttcctcgccctttcgttcctcaatcagctgattcagcttttttatcgcctgtccgacgccgcccacggcatcaattaatccgtaatcagccgcatctttgccgactacgttcgttccgatgtccctggttaagtttccttttgaaaacatcagctctttgaatttttcttcggaaatatttgaatgatgggtcacaaagttgacgacccgctcctgcattttatccaggtattcaaacgtttgcggaacgccgataaccagacctgtaagccgaacggggtgaatggtcattgtcgctgtctccgcgataaaactatgatcacatgacacggcgatcggcacacctatggagtggcccccgccgagtacgattgagacggtcggttttgataaggatgcgagcatttccgcaatcgcaagccccgcttccacatcgcctccgacggtgtttaagatgatcagaagtccttcgattttcggattttgctcaatggcgacgatttgcggaatgacatgttcatatttggttgttttattttgcggcgggagctggacgtgcccctcaatttggccgatgatcgtcaggcagtgaatattggtatcttgggacatttgcggcagagatgtctctcccagctgctgaattttgctcataatgctgtctttcgcatctgatttttcgggctgctgttcttcggtgttttccatacgatgatccattttatctttcaccctttccgaatgtctctttgtattatgaacaaagatgatgatttccatccgggacatgaacaaaaacaaagccggagcatcatgcgctccggctttgtatacattatacttccataatgatcggaatgatcatcggcttgcgttttgttttttcataaaggaattgattcagcgcatcacgcattgcttgtttcagcgtggaccattctacggcagatgtttccgtcgcttcagtcacgatagagcggacgagctcagtagcttgtacaattaacccctctgattctctgacatacacgaaaccgcgcgtaatgatctcagggcctgaaacaaggttcttcttctgcttatcgagtgaaatcacgacgatgagaatgccgtcttgtgacaataagcggcggtctctcagcacgatgttgccgatgtcgccgactccgaggccgtcaatcagaacgtttccgtatgtgactttatccccgattttcacattctggccgcggaattcaacgacatcacctttttcaatcaagaaaatgtcgctgcgtttcatgccgatctcttctgcgattttggaatgcgctttttgcattctgaattcaccgttaaccggaattaaatatttcggtttcagcaaattaagcatgagtttcaattcttcctgcgaaccgtgaccggacacatgcactcgtttttgggcgaaaatgacttgagcgccggcgcgggcaagcaggttgacggttttggaatatatcaattcatgccccggaatcggtgttgatgcaatgacaacggtgtctccttcttcaatgttaagctgcttgtgcgcctgcttggccattcgcgtaagagcggccagcggctcaccatggcttccggctgtaacaattgccacgtcccgcttcggatattttttcacatcctgcacaggaataaacatttcatcttcggcttcaatatagccgagcttgcgtccaagctgaagcacgttttgcagattttttccggcgattgcaagtttgcggccgttctggacggcagcctgtatcacttgctgaatccggttgatattagacgcgaatacagcaatgatgacacggttttctgaattgttcatcgcatcggaaatttcaccgcttacatatgcttctgacggagtataccccgggcgctccgcattggcgctgtcagaaagcagggcgagcacgccgctgtttccgattttggcaatttcgccaatatcacatgattgatgataagcaggcgtctggtcaaatttgaagtctcccgtgcatacaatagagccaagtgatgttttgaagctgactcccactgaatccggaatactgtgaatcgttttaaagaacgatactttcgttgattcaaatgtaatgactgatttagagtgaacttcacgtaaatcagcttttcgattatgcccgtactgcttgagtttttctctcagtaatgcaagcgtaagcttcgttccgtataccggcaccgacagcttgttcaataaataaaagacgcccccgatgttttcatcgtgcccgtgtgtcagaaagatggccttcacgcggtcagcccgttctactaagtaggaaatatccggaatgacgacatcaataccgagcatttcattttcagggtgcatcagccccgcatccactacaaatatgtctgagtcaatttcaatgacatataggttcttcccaatttctccgacgccgccaagggcgataattctgacgttttctgtatttttctttttcaaaatctgtatcctcctagtctcatacccgtccatcatcacttgttcctattataactgatatcaattttagaaaacaagaagaagcggaaggtttagggaaaaccaatatgtatacaaaacggtcaaactcacgataaaaatgagaatgaccgcgtatttcaactgtataaattttttcttacagttcgctgatgacgctgctcaggctcagacgttcatcttcattcagcgggataagaggaagacgcacagatccgacatcaaggcctttcagctgcagcgccgttttgaccggagccggattaggcgctttaaagagctccttcatgatcggcagaagcttctgatgaatcagtgccgcggttgccgtctgcccgttcgtatagtttttaatcatctgctgcatgtcagaacccacaatatggctggccactgacacgactcctcttccgccgactgcaagaataggaagcgttaacccgtcatcacctgaatagacgtaaaaatcttccggcgtttcggcaatgattttcgtaatggcatcaagatcgccgctcgcttctttaatcgcagagatattcggaatctccgcaagtctgatggccgtttccggcgcaagcgaagcgaccgttctgcccggcacgttgtaaagcatcacaggaagagacgtttcttcagctatggctttaaaatgacggtacatcccctcttgggaaggcttattataatacggcgtgacaagcataacgcaatcgacgccggcttcttcagctttttttgtcagtttaatggaatctttcgtattgttgcttcccgtacccgcaataacaggcacgcgtccgttcacttctttgactgtaaattcaaagagtgcaattttttcttccgttgaaagtgtcggggattcgccggtcgtgcctgcgacgactaaagaatccgtgccgtttttcaacaaatagtcgattaatgtagacagtttttgaaagtctacattccctttactgtcaaagggggtaatcatcgctgtagatatatttccgacattcatttttttcacctcatcatgattcaatcacatttactttgaaagttcaaacacttcatgcagcgcatttacggccgttaccatatctttttcatgaacgagcacccagatcgtcgtatggctgtcggcagattgcagaatcggaatgcctttatcagaaagtgcggagacgatttttgacgtgacacccggaacacccattattccggcgccgaccgctgacactttcgcacagctttccgtcactgtcggctcatatcctaattcagccaaaatgctgcgcgcggcttccgttttactgccggctacggtatatacgatttcactcggcgtaatgttaaagaaatctacactgattccggcatttgccattgctttaaagacttcagtctgaacgttgtattgccccattttggcgggaaccttaaattgcgtcacgtctttcacatgggcgatccccgtaatcagccgttcgaatacatcgctgccgatgttagacgaatgatgggacgtcaccaaagtgcctttgtcttttgaataagtggagcgcacgcggatcggcacctttgcctgcatggcgatttccaccgcgcgcggatgaatgactttcgcgccttgataagcaaggttgcagatttccgtatatgtgacattcggaagcggcttagcattttccacgattctcggatcggctgtcataacaccttccacgtccgtaaaaatgtcgataaactcagcatcaaccgccgcgccgagcgccgccgctgatgtatcgcttccacctctgccgatcgtcgtcgtgtcgcctttttcagtcgctccctgaaagcctgcgacaacgacggcatcatggctggcgagtgcagcgaaaagccgctctgttttcatttctataattttggcgtcagtatgctgggcattggttaaaaagccggcctgagctcctgttaaagctgcggcttttatgccgttttccttcagcatgctggaaaaaacaacggacgaaatcgtttctccgcaagacagaagcatatcctgctctctcggagaaatgtcggactggctgccgtaaaggagcccgattaaagaatctgtcgcgtacgggtctccttttcttcccatcgccgatacaacaacgacaaccttataaccttcacttatggcatcttttatgtgtgctagcgcaagcttgcggcctttgtcatcttttacggatgttccgccgaatttttgaacaatgatcttcactattttcactccaaattagtctgacgtaacagaagagagcaggcagagccttactctcttctgttcgcctatagaaaatacgtttgttttatacgaggttcagtttttgcaggctttccgcgatttgaactgagttccaagcggcgccttttaacaggttatcagaaacaacccacaaatgaaaaccgtttgctctgtccaaatctttccgaattcttcctacaaatacatcgcgtttgccgacgcaatcagcaggcatcgggtaaagctgctccgccggatcatcctgaagcgtaacacccggagcttcttttaaaagctgtttaatatcttcaacggttgcgtcatcacggtcaagctcaatgtaaacagattctgaatgccctgtttcaatcggcagtcttacacatgtcgcagccacttccagcttcggcatatgcatgatttttttcgtttcattaatcattttcatttcctcaaacgtatagccgttgtcttggaatttatcaatttgcggaatggcgttaaatgcgatttgataatgctttttgtcgcctttaaccggcataatggacggttctgcgggttcattgtttaaaatcgcctttgtctggctgtacaattctttcgccgcttcattgccggctccggacacagcttggtaagtagatacaatgacttttttcaaaccgtacgctttgcggatcggttcaagcgcagccaccatctgaatcgttgaacagttagggttggcgataatgccgttatgtttgtgcagatcaccttcgttcacctcaggcaccacgagcggtgtattttcgtccatacggaatgcgctcgtattgtcaatcacgatggctccccgttttacagcctcaggcgccaagctttgtgatacgcttccgccggcgctgaataacgcgatatgaacgccttcgaagctttcaggaacagcttcctgcactgtatattcttcgcctttaaacgttactttcgtaccagcagaacgctttgaggatagtagtgtgagtgtttcgatttcaaagtttctgtcttccagtgttttcagcatttgctgtcctacggctcccgtcgctccgacaactgctacgtgtaatcctcttcccatctgtaaaactccttccgccaattaagcatcatttgttgaattgactttgcattttacgttttattttaccatagaatagtcacggattgaccgaatttttttattccggaatgattttctgtcatcatgattttttattcatgatggtgtacgagcaccggctgaacctgctggtgcaaaagagctttttctaccgtaatcggaaggagatccattctggcgacgagcgatgtcggttttttcacgtggtcatcctggccgaacgggatgaaatatatgttttttgcggacatcagcctcattaaattcgttccgtttaaaccgagtccgtcatttgtcgaaattccgagcacgaccgggcggccgttgcggatcgtggctttcgcagccataaggacggggctgtcggtcatcgcatttgcgagtttgctcattgaatttccggttaaaggggcgatgaccatgcagtcgagcggaagtttcggcccgagtggctccgcttttacgatggaatcaatcgcctcaaagcctgttgtttcttcaatttttctgacccaatctcccccctccccaaagcgggtatcggtcgattgaacggttgatgtcacgaccggccggacttcagctccttgactgataagcgcctctatttgcggaaacacttcctcatatgtgcaatgcgagccggttaatccgaatccgattcttttccctttcagagacatggttatttcccctctttctttaagtctgccaaaagcttgctcaatacgttcgcaataatctgtccggctgttttcggggccacaattcccggaagacccggagcaagcagcgctttaatgccttgtttttcagcatatttgaaatccgttccgcccggacgggatgctaaatccaaaatcaaggtcttgggcgtcatgcgcgataaaacgctttgattcagaatcaagctcggtacggtgttaatgcagatatcaatatcatttacatgatcagtaagctcttcaagttgaaaaggagaaagccccatttccgatatacgggctaaatgagccgaactccgcgcgcccacttttactttcgcccctaacgctgcaaacgtccgggcgatcgtcataccggtgcgccccatgccaagaacggcgacatttgatccgtgaatggtataatccgtatgctgaatcgccatcatgattgttccttcaacagtgggaatcgagttgaatatcgcgatgtcgtcccgctcaaataatttcacaagcttacggccggcttcgctggcgatcccctcaagatacgcgttggagatgcctgaataaatgacgcaatgctccggtgtccgctcaagatagctctgctttaataccacttcttcatttgaaaaaaccgtggaaacaacgccttctccggtcgttgccgatacaggcaggatgatactgtctattttttgaaagggaatctcatcaattttgcatttgacggttcctgtaaaaccgtcatccaattggtcaaaccctgcaagataaatatcggcatgctgttctgtcagctttcttataatctcaagctgtcttgcgtcaccgccaatgatcgcaattgttaatccggttaacatctgaaacgttcaccttctttacagttactggatcctttaagtgtcatcctcctcttcatcgtatgtgcaaagagaaagggcggtgaatgtacagcgtctttttcataaaaaaagcaccggctgtatgagccggtgcttgcaaaaaatgaataagatctactcttcgggaggcgtgatctcccccggaacgtctaaaatgatcatgtctgacccgattttttggatatggttccaggggacgcggatgtcgtggccttgttttcgcagtccgaaccattttaccgtcggtatcaacagcgcggtaatttgtccgtcctgttcattaatttccaaatcggtctggccgagcacgccgagccgctctgcccgtttaatatccacaatttctttacctgacagttcactgagcctcatgatagccacccccttgtactatatgacccggagcaaaaaaaaatgcctgccccgtacagaggcagactgctttgcagcttaagacgaggccggtatattgccggtcgggctgatgagcgatagtgcgtaatcatccgtaaataagcggcggctgaggccgttgacgctttccaggctgaccgcatttaattcagcgataatttcatccatggtcttatgctttccgagcaggagttcatttttcccgttccggctcattttgctgtttgtgctttctaagctgagcattaagctccccttcatttgctctttgctgttttccagctctttcggggtgataccgtcacgttttagaaccgataacgtttcctgaatggtttcagacagaagtccgagctgattcgcgccggtgcctccgtaaatcgtcagcataccgctgtcttcataggaactgtgatagctgtatacagaataggccagtcctttatcttcgcgcacatcctggaaaagacggctgctcatgcttccgccaagcacgttgtttaagacgatcaaatcgtaaatgtccggatctccgactttcaggcctttgaaaccgagacagagatgcgcctgttcggtgtctttttttctcgtcagcttttcataatgaaactcaggctcgctgatgccgcttgctttgcccttcgcttcgtatgtaccgaaccatttctccacgtctttaatgaattgttccgttacatttccggcgacagaaatgacgacgcggtccggcgtgtaaaagtcatccatatgctgtctgagagaatcgccgttaaacgacgaaagcgtttcctccgtcccgagaatcgggtatccgagcgaatgattgccgtatgtcgctttgctcagcagatcgtggacaatgtcatccggtgcgtcttcatacattttgatttcttcatatacgacgttcttttcttttttgagctcatcttcgtcaaaagcagaatgaaagaacatatcagccagcacatcaagtgcgtagtttgcatgctcatccagcactttggcgtaatagcacgtatattcttttgaagtgaaggcattcacttggccgcctatccgatcgaaggattctgcgatttcacgtgcggacctggtatttgttcctttaaaaaacatatgctcaagaaagtgcgaaataccgtttgtctccggcgtttcatgacgtgatcccgtcccgatccatacgccgattgccacagaccgcaccgttggattattttcaagcacaactcttacaccgttttggcatgtatagcgttttatcaagtctgttcctcctattcaaagacaggcagctgcctgctacttcatcagcctgttttcatccattaagtcagacactgagccgagcgcgtagcctttttctttgatttttgcaatcagtgtatccaggcttttcgcagtcggatcagtcggatgcattaaaatcatggctccgttatgtattttgctcagcacccttgtttgtaaaacagcgggagacggtttttgccagtcaatggtgtcaacggtccacatgatggtgcccattcctttttccgccgcaaggtcgaccacggcttttctgaagctgccgcttggcggcgcaaaccatttcggcttcatgccgagcgtctcgctgatttgtgcattggttttgtcgagctgttcggaaatgcttcctgaagtcagtttgctcatatcagggtgattgtatgaatgatttccgatttcatgtccgtctgccgctatttttttccccagttcctgattgtttttcagccatttcccttcaagaaagaaagttgctttgacctggtgctgcttcagaataggcagcatttgctccacgtattcatttccccaggcgacatttatcaggaaagcgaccatcggtttgtcgggatttcctttataaatgggttcgggcgcgagagaatcaagatggactttcggctttacctgctcatagacaaggtcgtcttcgtgaaattctccgtcctttttcatttgtttataggatttttccacattgacttttaaaccgttatatcccggtatactcttccatattttatcaatccgagcgtcttgcggcttcacttcatactctgacgctttttgcagtaattcttcatagagcggatcttttgatgatgacacagttaccgcgtcttttttcattgcgtctatgtaatcaactgtatacgggttttttaacatttcaaacgaaacaaaaaaaagaaataaaaaaacggcaaacggcacgaattttttcaacatgtccttcccccctcatcacacattatgtatgaggaggacaaggtagaacccgtctgttgtctttctcaaaataaagaagccgggtctcccaggctccttgttaggttttcatttaagattgttgttgttcctgttctttttctttctcttcgcgcagcactgctttacgcgacagattcactcgtccctgtttgtcaatttcagttaccttcacaaggatttcgtcaccgattttcacaacatcctcaaccttgccgacccgttcgagcgctagttcagagatgtgaacgagaccgtcttttccgctgaagatttcaacgaaagcgccaaatttctcaatccgtttcactttaccgaggtaaagctggccgacttcgacttctctgacaagatcttcgatgatttttttcgctttttggttgctgctttcatcagtagaagaaataaagatggtgccgtcttgttcaatgtcaattttaacaccggtatcttcaatgattttgttgatttgtttaccgctcggtccgataacgtcacggattttatccggattaatggtcatcgttaaaattttcggcgcatattgagaaagttcttttcttgattcaccaagcgtgctgagcatgctgtccaagatttccattcttccttttttcgcctgctgaagcgcttcttcaagaatttctcttgaaaggccttcaattttaatgtccatttgcagcgctgtcacgcctttttccgtgccggctactttaaagtccatgtcaccgagggcgtcttccatcccttgaatatccgtcaatactgtatagtactcgcctgatttcacaagtcccatcgcgatacctgcaacaggggctttaatcggaacacctgcgtccatcatggcaagcgtacttgcgcagatgctggcctgtgaagtggaaccgtttgattcaagcacttcagatacgaggcggaccgtatacgggaagtctttttcattcggaatgaccggctcaagcgcacgctctccaagagcaccgtgaccgatctcacggcgtcccggtccgcgcatcgggcctgtctcccctacgctgaactgcgggaagttataatgatgcataaagcgttttgactcttccacgcctaaaccgtcaagaatctgaacgtctccaagggcgcctaatgtacaaacgctgagcgcctgcgtctgtcctctcgtaaacagcccggatccgtgcgttctcggcagaagaccgacttctgaagaaagcgggcggatttgatcaacgccgcggccgtccggacggactttttcttctgtgatcaaacggcgcacttcgtttttcacgagtttagacagtgtctgtttcacttttttaattgtatcttcatcatgctcttcttcttcgaatttcgcgacaactgcatttttcacttcattgatcgcgtcttcgcgagcatgtttttcgtgaacctgaatggcgctgagaagatccggctccgcaaggctttttacttttgcgctgagctcttcgtcaatttcatacagttcgatctctgttttctctttgccgactgctgcgacgatttcttcttggaatgcgatcaggcgcttgatttcttcgtgaccgaacataatcgcctcaagcatgatttcttcaggaacttcatccgctccggcttccaccatgttgatggcatcttttgtgcctgcaacgatgaggttgatatcacttttttcaagctggtcaaccgtcggattgatgacgaatttcccgtcaatgcggcctaccgtcacacccgcgatcgggccttcaaacgggatatcggaaacgcaaagagcgagtgatgaaccgaacattgcagccatttcagatgagcagtcctgatcaacactcatgacaatgctgatgacctgtacttcgttacggaatccgtctgcgaaaagcgggcggatcggacggtcgatcagacggctggctaaaacggccttttcacttggacggccttctcttttaataaaaccgcccggaattttacctactgcgtataatctttcttcatagttaacggtaagcgggaaaaaatctagcggtttcggttcttttgatgcggttgctgtgctgagcactgcagtatcgccgtagcggaccatgacagcgccgtttgcctgtttggcaagctggccggcttctactgtaagctgtctgccggcccaatctatggtaaagacatgtttctcttgtcccattcgattacgagctcctctcttaatgtgtgaaataatcaattactcctattatgaacgaaatgaattgaacatatcaatgtcaaagtagtatgtaaaaggatttcattgtttttttattattatttttttcgctttaatacgataaaaaagcgggaatcctcccgctttttacgattatcgacgtaagcctagtttgttaattaactcacggtaacgagttacgtctttattacgcagatacgtaagaagattacgacgtttacctaccattttaagaagaccgcgacgtgagtggtgatctttcttgtgagtacgcaaatgctcgttcaagttgttaattgagtctgttaggatagcgatctgaacttctggagaaccagtatcagattcgtgtgttttgaactcgctgatgagttgatttttacgctcttgagtaattgccatcctgtttcacctccatatcataattagccccagttacctagcaaccgtcggtgacttcggattgccaagcaatggttttaagactacgaaacatatgatactaaaaatcgcgcccatatgcaaatcttttagaataaaatttgtgtacttttgatgttttttccgttatttgctgaaaaaacggatcgcttcttgtttgtctttcccgatctgagccgtcagttcatcgatgccgttaaacttccgttcgcttcggattcgtttgtaccactcgattttaacgtcttctccgtatacatcctgttgaaaattaaacaaatgaacttcaattgacggctgatcgggacgcttttcataaaaggtcggtttgtagccgatgttgcagacgccttcatacacctcgccttttatttcggctttcactgcatacacgcctgtcggcggcacgatatagctgttgtgcaggccgacattcgcggtcggaaaaccgatggtgcggcctctcttgtctccgtgaatcacagtgccccggagaaaatacggctggccgagaagagtgtgcgcaagttcaacgtcaccatcctggagcgctgaccggatataagtggagctgatctttctgtcctgctcggtctgtttctcgacagtcgtgcatccggccttgccgtttaaatcgtccggcagcgtctccatcgtgccttttccgtattttccgtacgtaaaatcgaagcctcccacagcgtgccgcgcgttcaaccctaaaatatactcctcggcaaactgttttggagacagagacgcaaacgcttcatcaaactttacgacatacagcacatcagcgcctaaacgtccgatctggctgattttatcttcaagcggcgtaatcagatcctttggctctttgtccctgcccaacacatgggaagggtggggatgaaacgtcataacggccagcgacaggcctttttcttcggcaatttgtctggctgttccgattactttccggtgtcccaaatgaacgccgtcaaagtagccgagcgccatgacagacgccggctgctcttctttttgtaaatgatgcggatgagaaatatgtatcgtcttcacagaacggtcaccttttttcttattgttcgcttttttgcatgagcactttagccggtttcagcagtcctttttttgaaggatgcggcatataaatggccacacattctccgtcttcagtacagaccgctatacgggcgtcagctgtcattgcagaaaattccgccgggatgtcaaacactgacccgttttcagctttcttagctaatgtatcacttatgacccatttcggcaaatgattgagcgctctatcgatcggcacggcatgctctgcaaccgttccgtccgaaacctgctgttcaagttcctcaaacgtgaaacactcatcaaggctgaaatcgccggaagcagtgcggatgagatgcgacatatgcgcgggatagccgagtttttcaccgattgtcaccgccaacgttctgacgtaagtgccttttgagcacgtgactgtaaagcggaatgatgctgtgtcttcgttataagtgacaggggaagtgagcgcgatatcttcaatcgtgatattccgcttcggccgctccacttcaatacccgctctggcgtattcatagagctttttcccgttgacctttaccgcggaatacatcggcggcacttgctcctgcggtcccttcaattcgtctaaaacggctttgatatccgcttcttccagcggctccctgacaggctttacgctgaccgtttctcccgtctgatcttcggtcgatgtggagaaaccgagagtgatctcagcatcgtacgtttttgacttgtcggtgacgtactcaacgatctttgtagcccgtccgacacagatcggcagtacgcctgacacttccggatcaagggttcccgtatgcccgactttctttgtttttaacagttttcttattttcattacacagtcgtgagaagtcatgccgaccggtttatgtaaaaggagaactccgttaaccatctgtctttcgctcctttgttatcaattgtatcccgtaaaacgcagaaaagaggacagacgacactcgcccatcctctttcccgttattcagacggtttatctgaatgcagttcgtgaatcaatgtttcaatacgattgccgtactcaattgattcatcaaattcaaattcaagctcaggcgttttgcggagtctgattcggctgccgatttcggaacggataaatcctttcgctttctcaagccctttcagcgcctcttctttctttttctctccgccgagaacggagatatacaccttcgctatttgcaaatcacctgaaacacgtacgtctgttacagtgagaaatccgattctcgggtctttcagctttcggctgataatatccccgagctcttttttcatctgctcgccgacacggtttgctctcatactcaattcaatcacctctaagttaaaaccactctgttctagtgatcgtccgttctatctcgggaaaggagtcaataaacgcgagtacgcgctggatctccttttccgcctgaacgtgagaggaagagacgacagcgattccgaagctggtccgctgccaagtgtcctgatagccgatttctgcggccgacacgttgaacttattctgaaccctcgttataatccgcttcagaacggctcgtttctcctttaatgatcccgcatcataaatgatgcattcacattccgcaaatccgatcactttctttcgatttcctgcatgacatacgcttcaaggacgtcgccttcgcgaatgtcattgtatttcttaatcgttataccacattcatatccttgtgaaacttctttcacatcatctttgaagcgtttcagaacgtctacttccccttcgaagatgaccacgccgtcacggatcaggcggagtccgctgtcacgtgtaatgtggccgtctgttacatatccgccggcaatcgtgccgattttcgacactttgaatgtttggcgcacttcaacctgaccgatgactttttcttcgtattcaggatcaagcattcctttcatcgccgcttcaatttcttcgatgactttgtaaatgatacggtgaagacggatatctacattttcagcttcagccgtgctcttagcatttccgtctgggcgcacattaaacccgataacgattgcatttgaagctgatgcgagaatgatgtctgattccgtaatcgcaccgacgcctgtgtgaatgattttcacttttacgccttctacttcaattttttgaagagcggctgttaacgcttcggctgaaccttgaacgtcagcttttacgattaaattgatgtctttaacatcgccttgtttaatttgttcaaacagatcatcgaggctcagcttcgctttgtcgctgcgctgttcttccagttgcttggaagcgcgtgcttcaccgacagaacgggctgttttttcatctttaaagacgaggaattgatcgccagcctgcggtacgtcgtttaagcccgtgatttctacaggtgtggacggtccggctgttttcacgcggcggccgagatcattgaccatggcccgcacgcggccgaatgtatttccgacaacgatcggatctccgacatgcaatgttcccgtttgaacgagaagtgttgcgacagatcctcttcctttatcgagctcagcttcaataaccgttccttttgcctgacggttcggattggctttcagctcttccacttcactgacaagcagaatcatttcgacaagctcgtcaattcccttgcctgtaagagcagacagaggaacgaaaatcgtttctcctccccatgcttcaggaacgagtccgtattcagtcagctcctgcatgacacggtcagggttcgcgctttctttatccactttattcacggcaacgataatcggaacctcagccgctttcgcatggttgatggcttcgactgtttgcggcataacgccgtcatcagccgctacgactaaaatggtaatatcagttacttccgcaccgcgcgcacgcattgttgtgaacgccgcgtgtcccggagtatctaagaacgtgatttttttgccgttttcttcgatctggtacgccccgatatgctgggtgattccgccggcttcaccttcaacaacctttgtttttctgatgctgtcaaggagggtcgttttcccgtggtcaacgtggcccatgatcgtcacgacaggcggacggatttgaagatcttcttctttgtcagcctcttcatatttttcaagctcagtttcttcaagcacaatcacttcttctgtttccacaccgtattcagatgcgatcagttcgattgtgtctttgtcaagctcctggttaatggtagccattacacccagaagcatcagttttttaatgagttcagacggttctttgccaagttcttcggctaaggccccgactgttaaagagccggaaaacgtaattttctcaggaagctcttttttcggcttcagcggtttttgctgatactgatttttgttgttatgattgcgtttgtttttgtttttgttgttgttgttattcttcttgtttttgttaaattgattattctgcacgtcattcttctttccgtctcgaattttgtttggttgattcccagcaggctgctgattaatcccttgcggcttgtttttgttcgtttccgcaggcttctgagatgtaacgccggcgccgccttttttaaatttcgcatcaagctgcttaatggtcttttcttcaagcattgccatatggttatttactactatatccatgtttttcagcgcagtcaaaatttccttgcttgaaacattgatggcttttgcatattcgtaaactctcattttagccattcgttcacccccaaaaatattaatcgagcaagctgatcagcttattcgcaaaaccttggtcagtgacggcgacaacgacacgtgattccttgccgatagagcggccgagatccgcgcggctttcgacttttttataaggcactttataataattgcatttatcggatactttttttgcagtattcgcagatgcatcttctgtcagcagaacaagttttgcacgcgcatttctaatttcttttataaccaagtcctcgcccgacacgaccttacgagctcgattggccagacccagcaagggaaaccattccattccagacatgttattttttcaccttttccgccagttccagcaattcttcgaaaatctggtcatcgatttgtgattgaaattgattttgcaatgtgtttttctttttcgcagctaagatgcattctttctcaagggtgatataggcaccccgcccgttcttctttccggtcggatcgactgaaatctctccttctttagaacggacaattcggatcagttcctttttaggcttcatttcccccgttaccacgcatttgcgcagaggaattttttttcgcttattcacctaaagtcacctcttattcatccgattcggctgtttcaggctccataaagagcggctctaaatcgtcatcttcttcatgctctctcggatagatgccaaggtctcttgcatccgtttcacttttgatatcgattttccagcctgtcagtttcgcggctaagcgggcgttttgccctctttttccgattgccagagaaagctggtaatcaggaacgatgacagtcgtggctttttcttcttcgctgacgatgacatccagtactttagacgggctgagcgcattggcaacaaattcaaccggatcatcagaccagttgacgatatcaattttttcgcctttcagttcattgacgatcgcctgcacccgctggcctttaggaccgacgcatgaaccgaccggatcaacgtcagggtcatcagtgcggacggagattttagagcggtcgcccgcttctctggcaacggatttcagttcgaccgttccgtcataaatttccggcacttcgatttcaaaaagacgcttcaacagaccaggatgcgttcttgatacatagatctgcggcccttttgtcgttttttcgacttttgtgataaatactttaatccgatcgtgcggtttatagctctcattcggcatttgttcattgacgggcagcagcgcttcaatcttgccgagagacacgtaaataaacttgctgtctaagcgctgtacaattcccgtcatgatgtcttcttcacgatcgataaattctgagtaaatcacgccgcgctcagcttcacggacacgctgcgtcaccacttgtttcgccgtctgcgcagcaatgcggccgaagtctttcggcgttacttctatttcaacgacatctccgacaaggtagttcggatggatgtgctgggcgtcgtcaagcgagatttcaagtcttgaatcgtatacctcgtctacgacatcctttcttgcgaacacgcgaatcgtgcccgtctcacggttcagatcgacccgtacgttttgcgcctggttaaaatttcgcttatacgcggaaattaaggcagcttcaattgcttcgatgataatgtctttactgatgcctttttctttttcaagaatagtgagagcatctaatagttcactgctcatgttagcggtctccccccttaaacactaatacttcattcattaaaatgttacagctaatcttgcgttagctattttttcatacggaatattgacccgtttctttcttgttttgaccgtcatctctattgtaacagtttgtccatcaaattcagccaatttgccttcaaacacttttaaaccgtcaatcggttcgtacgttttcatgtacacatttttgcccagtgatttttcgaagtcggcttttttctttaatggacgctcggctccaggagaagatacttcaagaaagtagttctgagtgatcggatcggcctcatccagcttttcgcttaacgcttcgctgactttggcgcactcctcaatatcaacaccgttatcggaatcaataaacacgcgaaggaaccagttttgaccctctttgacaaattcaatgtctacgagttcaagctgaaggtcatccagtatgggctgagccattccttgaacggtatcagtcacttttttgctcatgtttttcctccttgtgctgtcgatatcatatcagccgttcctctgcataaaaaccctgcttcaaaagagcaggggcattgagaaaacgatggacatgtcgaggcaaaattgcctgttcaatacaaaagagcgggtttccccactctttgcctcggtaatcgttagcatttccaataaaactataccataaccatatatttaatgcaaatcaaactccgctcggaggctgtgcacaaagcttaaaacagagacagctgattttggtccggaagcgactcaagacagccgtgacggtctaaatactctaaaatggtttttgacacttttcctcgtttttgaagatcctcttttgaaaggaactccccttcttcccgtgctttcacaatattgagagcggcgttggttccgagtcccggaattgagttgaacggcgggatgagactgttgccgtcaatgataaattccgaagcgctcgaacggtatagatcgaccttctggaaggaatagccgcgctcacacatttcaagcgcaagctctaacacggtaaggaggtttttctccttcggcgaagcatcaagccctttagagctgatatcatccatcaccgctctgatggcggtcgagcctttaatcattgtatcaatgtcaaagtcatctgcgcggacggtaaaatacgcagcataatataaaagcgcgtgatgcactttaaaataggcaatccgcaccgccatcagcacgtatgcggcggcgtgggctttcgggaacatgtatttgatttttttgcatgaatcaatataccagttcggcacattgttctttttcatttcttcttcccattccggcgtcaggcctttgcctttacgcacgaattccatgattttaaaggccagtgaaggctcaaggccctgataaatcaagtaaaccataatgtcatcacggcagccgatcacttcgctcagttcacacgtattgttgtgtatcagttcctgcgcgttgccgagccatacgtccgtgccgtgggaaagcccggaaatctggacaagctcggagaacgtcgtcggcttcgtatcctcaagcatctgccgcacaaatcgcgtcccgaattcaggaataccgagcgtccccgttttacagccgatctgctcttcagtgacgccgagcgattctgtaccttggaaaatcttcataacttccggatcatctgtcggaatcgtcttcggatcaattccgcttaaatcctggagcatccggatgactgtcgggtcatcgtgccccaatatatcaagcttcagcaggttgtcatgaatggagtggaagtcaaaatgagtcgttttccattcagaccccgtcgcatctgccgggaattgtatcggggaaaaatcgtaaatatccatgtaatccgggacaacgataatcccccccgggtgctggccggtcgttctcttaacgccggtgcagccctgcaccagacggtcgatctccgcgccgcgcatgtgtaggttgtgatcacccgcatagcctttcacatatccgtaagccgtcttttccgcaacggtgccgatcgttcccgcgcgatacacgttatcttcaccgaacagcactttcgtgtagttatgggcatggggctgatactcacctgagaagttcaagtcgatatcgggtactttgtcacctttaaagcctaagaacgtttcaaacgggatatcatgcccgtcctttttcaaaggtgtgccgcaagacgggcagcttttatccggaaggtcaaaaccggaaccgactgatccgtcattaaagaattccgaatatcggcagctcgggcacacatagtgcggagcgagcggattcacttcagtaatttccgttaaggtcgccacaagcgatgaaccgacggacccccgggagccgacgagataaccgtcatccagagaccgttttacaagcttatgggagatgagataaataacggcgaatccatgaccgatgatgctttttaattctttttctattctcgcttccacaatttcaggaagctcttcaccgtaaatgcttctggcgcgctgatagctcatttcacggatttcttcatcggctccgtcaattttcggcgtgtacagatcgtctttgatcggtttgatctcattgatcatcgaagcgactttctgcgtattgtcaaccacaatttctttcgctttttccgcaccgagaaaggagaaagcatccagcatttcatctgtcgttctgaagtgcactttaggcagttcgtgcctgtttaacgggttggcgccgccttgggaagatattaagatcttccggtaaattttgtcctcatcgtttaaatagtgaacatttccggtggcaacgaccggcttattcaatttttccccgagcttcgtgatgttggcgatgatttctttcagcgctttttcatcccggacgagctcaagctgcagaaggtgtctgtatacttccggcggctgcacttcaagataatcatagaatgatgcgatatcttcaacctcttcaggtgatttttgcatcatgccttcaaagacctctcccctgtcacaggcagagccgattaacagaccttctctgtatttattaagctgcgacctcggaatgcgcggcactctgtagaaatattgaatatgagaaatagacacgagcttaaacagatttttaaggccggtctcatttacggcaagcaatgtagcgtgataaggccttgatctttgataagcattggattgtcccatattctcattcagctgatcatgataaaaaatgtctttttcagcggcatctttgagcattttcaacagcaggtagcccgttgcttcagcgtcaaagaccgctcggtgatgctgggttaattcgatatcaaacttcttacataacgtatttaagcggtgatttttaaactcaggatacaggaaacgcgcgagttccagcgtatcaatgactggatttttcgctttttccgttttcagtagacgcttgtacgccacatttaaaaatcccatatcaaagctggcgttatgagccacaagcacgtcatcgccgatccattctttaaaatcccggacgacgtcaacgacatcgggagcgtcgcggaccatgtcatccgtaatcccggtaagctctatcgtcgttgctgacagcggatggtgcggattggcgaacgcttcgaatttatcgatgatttctccgcctcttattttgactgcggcaagctcaatgatggtgtcatacactgcggacagacctgtcgtttcaacgtcaaagacgacgtatgtgtcttcttccaaaagacggtgagctggattgtatgcgatcggaacaccgtcatccacgatattggcttccattccgtaaatcattttaatgccgtgttttttcgcggcggaataggcatccgggaaagactgcacaacggcatgatcagttaacgcaatcgcttcatgtccccattttttcgcctgttcgacaagctttccgatgcccgttacagcatccatttggctcatcggagaatgcagatgaagctcaacccgtttttcgccttcaggagcggtgtcttcacgggttttggcttttatttcattcacgtcatttgcaatcatgacgaggtctctgacgaatgtatcgttttgaatgcttccccgcgccttcacccacatgccttttttcagcgttttcatcaaagcggcgtcttctttttctctggcgaacatttttactaaaatactgtttgtatagtccgtgattttgaaaatgcagagcgtgcgtccgcttttcagctcgcgtgtttcagcatcaaacacaaacccctgcaccgtgattcttctttcttcatccatgatgctgtcaagcgtccggatttcttcgttctctttaatttgatagccgatgacaagcgggccggacggcgcttgatcctcatcgccctctttttccttcttctccatttcgataagcgcctgcatcgcccgctcctgatcttcagcaagcttttgctcgcggaatttctggacttcttggtcagatacgaaaatttcggtatccagctgcagttccggaaatccgaattggcgatagctgtgctgaatcagtgcgctgtatttatttttgagcgccgatgcttctgtatctgtttttgttttcacgatcagtttgtttcccttgagcttcggcttctgctgattcaaaagagccaccatcggcggcgaggttccttcaagctcttcaatacagcgtgtccaataatcctgtacaagctcctctgtcactgtaggatcgatgacctgaacagacgatgtgacacgggcgatgtgagcaaacgattgtgttaacctcatcatgaatgaatcgtatatttgatacggcaaaagagccttaaagcgaaattggaaatgccaggctttttctgctttatggattgtcagtttatcaatctctccgtcttcaaagtatgtcatgaaggtatcatctgtcatattaagctgctgcagaagaatctgaaactgtcttctgtttactgataactgttccattcagacagtatccctcccttaaaacatcataagtgaaggtacctccgcaggtgatgaggtaccttcttttttctctattttaacatgattttgtacgattcgttatggtgattacttcgtcttaataaattcagaaagctcatccactgaaacttcagcagattcaccggttttgcggattttcacttctacgatgccttcgtcggcacgttttccgacagtgatgcggatcggaaggccgatcagatcagaatcagcaaacttcacgcctgcgcgttcagcgcggtcatcgtataaaacctcataaccttccgtctggaattttccgtaaagctgttcagcaagctctttttgcgcttcatttttcatattcagcgccaaaatatgaagatcatacggagcaacgctcttcggccagatcaagcctttttcgtcgtgatgctgttcagcgatggcagaaagcgttctggacacgccgattccgtaacatcccatcagcatcggctgcgcacgcccgttttcatcaaggtatgtcgcattcatcgcttcagagtaacgcgtgccgagtttaaagacttgtccgacctcaatcccttcagcgaaacggatcgtgccttttccgtcaggtgacggatcgccttcctgaatgattcgaagatcggcatacgcttttacagacgcgtcacgttcgatgtttacgtttcggtaatgacggtctttttcattcgcgccgcaaacggcgtttaccattactttcacggcttggtcggcataaatctcaatgtcgccggcagcgccgatcggccccgcaaatcccggctccgtgccaagtttctccgctacttcttcatgagacgcaagctcaaccacttccgcgttcagaaggtttttcactttcacgtcgttgacctcatgatcgcctcttactaacacgagaacaaatcggtcatccgctttaaacagcattgatttgatgcaggcgctcggctcgatctgcaagaacgaagcgagctcttcaatgcttttgacatttggcgtatcaattttctccaatgcctcgggtgtttcatctgacggctcgctgttcatgacaactttcgccatttccgtattggctgcgtaagaggatccatcggaataagcgatggtatcttcccctatttcagaaagagccataaattcatgcgtgtcttttccgcccatcgcgcctgagtcggcaataacgggacggacgtttaattcacagcgtgcgaaaatgctgctgtatgcgccgtacatgttttggtacgtttcctccagactttcttcagaagcatggaaagaatacgcatctttcatgatgaattcgcgtccgcgcaataacccgaaacgcgggcgtttttcatctctgaatttagactggatctggtaaagagtgagcggcagacgcttataagatttcacctcatcacgcacgagagaagtaatgacttcttcatgtgtcgcgcctaaagcaaattcacggccgtggcggtctttcagacgcattaattcaggcccgtacgtataccatctgcctgattcctgccatgtttcagcctgctgaagggccggcatcagcatttccaccgcgttgattttttccatttcttcacgcacgatcttctgaatgttttgaatgaccctgtaagccaggggcatgtagctgtaaaccccgctcgtattttgtctgataaatcccgctctcagcagaagcttatggctttttgcttcagcatcagccggcacttctctcagggtcggaataagcgtcaaactttgtctcatgtcttcgcacctctgattttttactagtcaattataagaataaacgctggatatcgttccatgtgacaaccagcataagaagcattaagaaagctacgccgataaatacgacaaatgcttccttgtcacggtttatcggcttgccgcggattgcttcaatgaataaaaacagcagccgtccgccgtcaagcgccggtatcggcagcaggttgacgattcccaggttgatgcttaaaaacgccgcaaactggaataggttgataataccggtttttgcaacttgatccgtcatatcataaatgccgacaggacccgaaagcatatcaagcttaaactggcctgtcacaagtttgctcagattggtcaggatcgcttttgtgacatcaacggtagatgtcgcgccgtaagcaatcgctgcaagcgctcctttttcagtcggcgcataagagccgaagcggccgattgtttttttattttcatcttttacagcttcaggtgtaaccgagatatgaaacgatttgccgtcccgtttgacggcgacatcgatttttttcccgggattttcttttaccgctgtcacgatgtcggtccatgacctcattttttcaccgttaatgctctggatatagtcgccttcttttaaaccggcagcagctgcgcgtccattgtctgtcagcttcccgagctcaggctgatttgaaggcacgccttgaatgaatccgagcatgacgagaatgacatacgctaagatgaagttcattatcggaccggcagcaatcgccttaatccgcttccatacgggtttagacccgaattgtcgattgtaaggcgcaatctgcacttcttctccgtctacgataaaaaaagaggtctgactgacagtaaagcccgccagttcatcttctttcccctgctcgtacccggtaatcttcatttcgtgctcaagatcagccgtctccacctcgataattaaagcgtcgggatatttttccttttgattaatgatgactttttccacttcgtcatctttattaaaaagaagcccgacggtataaccgggtttgacttcgatcatctccgggtcttcaccggccatgcggacgaaccctccgaccggaaggagtctgatcgtatacacggtttcattctttttaaatgaaaagattttagggccgaagccgatcgcaaattcacggcaaaggattcccgctctttgggcgagcaataaatgcccgagctcatggaaaaaaacgagcgttccgaaaataataataaacgcgataactgtattcacgaacataccaccttatgtgagtattgaattaacgtatccccgggtgtctttgtccacttcttggatatccgcaagactcggatcctgaattacgctgtggcggtccaatgctttttcaatcaggtcctcaatcgataagaatgaaatccgtccggcaagaaaagcggcaacggcttcttcgttggccgcatttaaaaccgtcggcatcgttccccctattttacctgattcaaaggcaaattgtaagcagcggaacctttcaaagtcagctttcgcaaaatgaaggcttccgatctcccataattcaagcctttttgtttcaggcagaggcagccggtccggatatgtcagcgcgtattgaatcggcaccctcatgtccggatttccgagctgggcgatgacgcttctgtcgtgaaattcaaccatcgaatgaatgatgctctctttatgtaatacaacgtcaatctgttcatacggaatgtcaaacagccaatgcgcttcaatgacttcaagccctttattcatcattgtagccgagtcaatcgtaatctttgcacccatcgaccagttcgggtgattaagggcgtcggcaatcgttacagactcaagctcctgccgcgttttatccctgaaactgccgccggatgccgtaatgatcaggcgctcgatatttttgctctgttcgccttgcagcgcctgaaaaatagcggaatgttcgctgtcaaccggaagaagaggaacaccgtatcgttttgcgtgtcctttcactatatgcccggcagtgacgagagtttccttatttgcaagcgcaattgtttttttctgttcaatcgctttcaaagtcgggattaaaccgacgcttccaagcagcgcattgaccacgatatccacttcgtccatgactgccgcttcaatcaggccttcttctccgatgccgatttgacattcatgcgaaaaagacgcttctttcactttttgatatgtatccatgtcgccgactgctacatatttcggctgaaacgttctgatcaacgggatcgctttctcggcgtttttaccgaaagtcatcgagacgagacggaactgatcttgatgcatgcgcaatacgtctaacgtctgctccccgattgatcctgttgctcctaaaagacaaatattcttcaaaatgccactcccattctatgcgtccagatcggtcttattttcatattagcctttctcatgaaaaaagcgcaagcagaaagtataagaacggcatgacaaacaaaaagctgtcaaatcggtctaaaatgccgccgtgcccgggaaggattttccccgaatccttcacatcatagtgccgcttaagcgctgattcaaccaaatccccgatctgtccgaacacagacagaacaagcgtgatgaccaaaagaaccggatatgaaatcggaaggtgagcaaacagctgaaaaacggccgtaaaaataagggcgatgacaataccgccgagaaacccttccactgttttgttgggactgatttcgggccacagcttccgcttcccgagcgactttccgacgaaatatgcgcctgagtccgttgaccatatgacaacgcaggcataaaagatatacaaaagcccgtttgtttcaatgtttctgatttcaataaaataatgaaaacacagtccgatatataccgtcgcgagaacgataaacccgacttcgtcaaacgtaaaggtgtttttcacgagcaccgtatagctgagcagaatcaatacggcgaaaatcgttacttccattttcgcatcgaaaaaatgatatttgtccggcatcatatacagccataacaacaagaagctgatcagacccggaaaagaaaaaaatctgagctttttcatccgcaaaagctcaaaaagcgctatacttcccatcacgtaaacaaatacggtgaacggcaatcctccgaaaataaccaaaaataaaaatagtgccgctgccagaacacctgttaacagtctttgtttcatttccaccatcctctaaattccgccaaacctccggccccgctgctgaaattctcccactgcctgcagaaagtgatcttctttaaaatcgggccacaggacatctgtaaaaacaaattcactgtaagccacctgccaaagcataaagttgctcagtctgatttctccgctcgttctgatgagcagttccgggtcctggattgattctgtcattaaatgcccggaaaagagcgcttcatcaatgtcttcgatattcagcgtgccgcttttcacctgttcggccaatgcttttgccgcattgacgatttccgtgcgtccgccgtagttcaaagcgaaattgagaatcagcccgtcattttgttctgtatcttttacggccttctcaatcgccctgtacgtatgagaagggagcgcggattcatctccgataattttcacctgtacattttcctctatcaattcaggaagatacgtattcaggaactcttccggaagcttcatcaaaaagtcgacttccatcttcggtcgcttccaattctccgttgaaaacgcataaagagtcagaactttaacgccgagctgatttgcgagctttgtcaccctttttaccactttcattccttcatgatgtccggcaatccgcgggagtgagcgcttcttcgcccagcgtccgtttccgtccataataatggcaatgtgtgcgggaatttcacccttcagtatgtcttcttttgtataccgttctaagttggaagccgcattctgctgattcttccaatttttgagtatgttgagcatgagattcctccgtcacccaaaaaggttgcgttgctgatgatcaatgtaatcaacagtattaacaaaaaaaccccctgtaaacatgagagggtcttttcacattatctattgtacatagtttttcattaaacttccatgatttctttttctttgtctttcgtgacgctgtcaatttttgacacatattcatctgtcagcttttgaacgtcttcactggaagcacgaagctcgtcttctgtaatgtccccgtttttctcaagttttttgaggtcgtcgttgctgtcacggcggacattacggactgctactttcgcttcttccgcgtattttttcacgactttgacaagttctttacgtctttcttccgtcagagccgggatcgcgatgcgaataattgtgccgtcacttgtcggagttacgccaaggtcagctttcaggatcgctttttcaatatcgccgattgccgttttgtcatacggtgtgacaacaagcatacgcgcttcaggcacattgatggaagacagctggtttaaaggtgtttgggcaccgtagtattctactgtcactttatccaatagagatgggttggcacgtcccgcgcggactgacgccaattcacgtgaataagcggcaaccgctttttccatgcgttcttttgtttgtgttaatacttcgtttgacaacgttatttcccccttacgatcgttccgattgattcgccgattacggcacgcttaatatttccttcttccataatagaaaagacgatcagcggaatatcattatccatacatagtgaagaagccgtagaatccatgacttccagcccgtcttttaacacatcgagataagataatttttcgtatttaacagctgactcatcttttctcggatcggcattatacacaccgtcgacattatttttcgccattaaaatcacatccgcttcgatttcagcggcacgcagcgctgcggttgtgtccgtagagaaataagggtttcccgttcccgcggcaaaaatcacaacgcgttttttctccaggtggcggatggcttttcttctgatataaggctcagcgacctgacgcatttcaattgatgtctgcactctggactgaattccgagcgtttccaggctgtcctgcagggcaagtgagttcatgacagtagcaagcatgcccatataatcggccgtcgcacggtccattcctaagtcactgcctgtttttccgcgccataagttgccgccgcctacaactacggccacttcgacgtcaagctcagcgatttcttttacctgtttagcgatggattggataacagtcggattaatgccgtttccctgctctcctgccaatgcttctccgctaagctttaaaacgatacgattgtattttggtttttccataataacctccaagtgtaaacattgccgtttcctattatgcaagagaaaaaaaggtttgtaaatatagttttaaaaatagggaacacaagtagtgtcccctatactgcctgaaaagccgcgaaagattcgccaaggctttccgccattattttttcacttggttcataacttcttcagcaaagttttcttggcgtttttcaatgccttctccaacttcgtagcggacgtaagttttaacagatgcgtttttcgcagccacaacttgtttcactttttcgtctgggtttttaacgaaagcttggtctaataagcaaatttcttcgaagaatttgttcagacggccttcaaccattttagctacgatgttttccggtttgccttcttgaagagcttgctgagtcaggatctgacgctcatggtttgcttcttcttcagacacttggtcgcgggaaatataacgaggatttaccgctgcaacatgcatcgcgatgtcttttgcaagatcttcgtcagttgttccgctaagaacggataatacgccgatgcggcctcccatgtgaaggtaagcaccgaacgcttcgctgtcttcttttgtaagaacagcaaaacggcgaagagtgattttctctccgattttagcaacattgcttgtgatgtattcttcaacagtagaaccgttttccatcttttgacccaacgcttcttcaagatcagcaggagcgtttgcaagaaggtggtcagcaagcgtgttcagaagctctttgaagccttcgtttttcgcaacgaaatcagtttcagagtttacttctaagataacgcctttgttgccgtcagttttaataagagtagaaccttcagcagcgatacggtcagcttttttagccgctttcgcaattcctttttctctcagaaggtcgattgctttgtccatatctccgtcagtttcagtcaatgcttttttacagtccatcataccagcgcctgttttttgacgcagttcttttacctgctgtgcagtaatagccatttgaattcctccttatatgtgtaaacaagatatgtatagatacatttttcttgaaaaaaggtgataaaaggcagtccctcttatcaccttttgattaggttacgcagttgtcgtttctgtttcaggtgcagtctcttcagcagcttccgcttcttcttcgccttgcttcgcttcaagaatggcatctgccattttagaagtaagaagtttgacagcgcggattgcgtcatcgtttgcagggattacgacatcaatttcatcaggatcacagtttgtatctacgattccgatgataggaatgttcaatttgcgagcttccgcaacagcgatgcgctctttgcgaggatcgatgatgaataatgcatcaggaagatccttcatgtctttaattccgccgaggaatttttcaagacgctctaattcttttttcaattgaacaacttcttttttcggaagtacttcaaatgtaccgttttcttgcattttctcgatgtctttcagacgcttaatgcgtttttggattgtttcgaagtttgtcagtgtaccgcccaaccagcgttggttgacatagtacatgccagagcgtacagcttcttctttaacagaatcctgagcttgtttttttgtgccgacgaaaaggatttttccgccttcagcagcaaggtttttcgtgaagttgtaagcttcctctacttttttcactgttttttgaaggtcaatgatgtagattccgttacgctccgtgaaaatgtaacgcttcatttttgggttccagcggcgtgtttggtggccgaagtgaacaccagcttcaagcaattgtttcatagaaataactgacatgtgatttcctcctaataaaatggtttttttcctccgcttaggtcatttttgtgcagaactgccgtttgcagcaccctctgcataaatcgttaagcgtgtgtatttaacaccaagacataatataacacagctttatgcgacaatcaagaatcctttacagctttgccgcgaaattttaaaaacagctcgatttctgtctttccgctctgcacccgtttggcgatttccgcaggggtgagcccttgttcatataattctgaaacacgttcttcaaacgaatgcgcaccgttgttttcgtcactttcagcccgttccgttgcactgatgagcttttccatgtgatccggaatatcaggctcttttttcggttccggccggggttcggcgtcttctgcgtcaggcgcttgatcattccggctttttgtgtcttcgagtctttcattttcttctttcagctcaagcagaaacgctgcaagggtgttttccgtctcttcaagaatcttcttctgctggcgctccgtctccttgagggctgaaaacctcgtgtacagaataatgacggcataaagcagtacgccgtgaagcacaaagcttaaaagccataatagtgttgacatgtttttcactcgctaaccatgagttcattattgaattactttttcaagcaggtgctttaatttaaacagcgcctttgaatgaatctgtgaaatccgcgacgtcgaaaggttcaggacttgtccgatttcggtcaaagtcagttcttctttatagaataaactgacgacaagctgctctttttcagagagctcgtgaattttgcccgcaagctgagcgatcagctcgtccttcatgattttttcttccggcggcacatttttgtcatctctgatcatcacttgaatattctcaccgtcatcctggtcgtgaagcttttcatcaattgataagagattggcaaaaaacccttcattcatcgttgatactacgtcctgctccgtcatcccaagctcttctgcgatctctgaaggcgtcacattccgaaggtagcgctgttcaagtttttcgattgccgcttcgactttttttgtcttctcccgtgaagttctgggcagccaatcttctttacgcagcccgtcgatgattgcaccgcgaattctaaacgaggcataggtatcaaattttaaatcccggccggggtcaaatttttctagggcatcatataaaccaagcataccaaggctcattagatcgtctttatgcaccgatttcggcagtccgacggaaattctgccgacatgatatgtgaccaaaggcatgtaacggcgcattaaatcatcaccggctttaggatctttccactctttccagcgcgaccaaagcacctgatcttcataattcaaggattgcattgttatccccctacctcatacctttattaaatcgttgtttcaccttgtttaacagttcgaatgtgcagcatgcaggactttggctcaaattcaatcgtccggccgcttgagccgcccgtatcttcactgatgaccggaatgttatacaatgaaagctgctctttgatagccgctacattcctcggaccgattttcatcaggtcgtttgtcattttaaacttaaacatctccgctcccccggcgagttttgccttcagggcaaacttgcggcagccggctttcaaaagcatatcaattgtcatcttaacggcggtgtccgcgtattttgcacggttgagctccgccgtttttgataaaccggagtccggcagcatgacgtgaacgagtcctgccgtttgtttgtctttatcgtataaaaccagccccacgcatgaaccgagtcccgaagtccggattttatccggataacgcgcgacttgaacatccgcaatccccactttaacgactgcggcttccgcacggctcataaagccgcacccaatgagacgaagagcttttcaaaagaatcatagtccgggagcataaacatatgggctttgagctcctgccggctgccctggtcaaaaatagaagtatccacgacaatggcatgctctccgacttggctgagctccatcagtccttcactgataaccgcgccgaacatatcaagtgagatttccggcacgctcgggtaaatctcaagctttgtcaaatcagccaatgccgttaaataggaacctgctaaaatattgccgaactcatgtaaagcagaagaactcaaatgatcttcgcccaactggtcaatatcaaaatccggatttccgatcagctctctgataaactgttccgcctgatggaaaggcatgatgagaaagatagagcctgtcatgtcgccttccattcttaaaaagatactggcgaccggcgtttcagccccgccgaaaaaatcagcgagctcatcaaatgtcaataaagtcgcaaacggcacttccatgtctatctttctgttcagcagctgagccatggcagaagccgagtgacccgccccgatatttccgacttcccgcaaaatatccatctgctcttctttgatcgcttcaaacttactcatgttgtcttttcccctttaagcattcggctctccggacgcagatgccgaagcacctttatccagcaccgcatgcgcatcaataatattgaggagcctgttatcttgcttgacgatctgtttaatccacacatccgtttcctttgtctggctttcaggcgcggattcgatttcattttcatgcacggtgatgacgtcattggcctcatccacgacccatccgacatcggcgtcacggtaagaaatgatgataatccgtgtctcttctgtgatgtcctgttcaggctggttcagacgttttcttaaatcaagaaccggggtaattactccgcgcagattgataacgccgcggatatacgattccacacccgggaccctcgtcggtttttgccacttttcaattgatttcacctgggaaactgagatagcgtattctttcccgtttatcataaacacaatcattttttcacctgttttgatttcagcagtcatgcgggcacctcctcgtgtcgttttagtagatcagcgcattgcaatcaataatcagcgccacttctccgtttccgagaatcgtagcgccggaaatcgcaaagacgttcgtcaaatagtcgccgagtgatttcagtacgacttcctgctgtccgataaaagagtccacgacaaaagcagtggatttatcgccctttttcacgacgattacatggaactgatcggcatcctgttttgaatctgtaatgccgaattcttttttgagatagacgatcggaacgatttgtcctctgaaatcaatcacttctctgtcatgcgtctgcaggatatctttcttatcaataacagccgtctctataatagaagaaatcggtatcgcaaacgtctcttcttccagtttaatgagaagaacggatataattgaaagtgtcagcggaagctggatactgaaaagagaaccttggccttccgcggatttgacactgacagagccgccgagtgattcgagtttattttttacgacatccagaccgacgccccgacctgaaatgtcagaaatttgatcggcagtcgagaagccaggagcaaaaataagctcgtaaatctcattatcttcaagcgtttcagcatcacgttcggtaattacactccgctcgagcgctttttcaagaattttctttctgttcaggccggccccgtcatcttcaacttcaataaagacatgattgccgctgtgatatgccttaagcacgacatgacccgattccggttttcctttattcacccgcacttcaggcgattcaatgccgtgatcgatgctgtttctgattaaatggacaagcggatcgccgatttcatcaatcaccgtgcggtccagctccgtttcagctccgatgatggacaattcgattttcttgtttaattccttttgaagctggcggatcattctcgggaaacggttaaagacggtttctaccggcaccatccgcatattaagaataatagactgaaggtcgcccgaaattctggtcaggcgttcaacggtttcagtcagctcattgtggtcaagctctttggcgatctgctcaagacgtccgcggtcaatgacaagttcttcaaaaaggttcattgaagaatccagtctttcaatgttgacgcgaatcgttttcgagccgctgtgatgcttcggctgctcttccgttttcgcttgcggtttcggctgtttttcagcctttttaaccggagtttccttcaccggttcagctgcttgcggtttttcggccgtttttaacggcgcaccggcagaaatttcgacattctccacttctgaaatgccgctgatgagttctttaatttcttcagcaggctgctttgtcaagaaacacacctgaaaatccgttccgaaatcttccgtctcaagcacttccgcggcgggtatcgtttttgcaacttccccggcttcattcagcttttcaaatatcatgtacacgcgcacggctttgagcatgcagctttcattcagggaaaccgttatttcatagcggctgaatccttgctcttccgcctcttcaataacagtccgttcgaactcatcataattccattcagttgaagtctgttgttttgaagccggcggttctgctgtttcggctgaagccgcagtctcatgcgccgcatttacgtcgagcttcgcacttacttcagaaatatcacgtttgccgtctcctccgtcaataatggactgcaccatctcttcaagatgatcaagcgcttcaaacagcacgtccagccaatccgatgtaacgggcatttctccgttgcggatggcgtccagcacattttccatcaggtgggttaaatgcgccagatctgtatatcccatcgttgcgctcatgcctttcagcgtatgggcagctctgaagatgtcatgcacaagctgaaggtctgccggatctttttccaacagcagcagcttttcgttacatgtctgtaagtgctctttactttcatcaataaagacatctaaatattgattcatatccaattgattcacaccctctcttttttcacacatccggtgatggatgccgcgatatcttccacatgtttaatctcatgaatgaggcccgcctttatcgctgacttcggcattccaaacacaacacaggattcgtccgattccgcaatcgttttaacgccgcctgttctgagcatttcttttacgccctcggttccgtcgctgcccatgcctgtcataatgacggctaccttttcgtaaccggataaacggcttgccgaccgaaacaaataatcggctgacggtttatgccggctttccgtatcatgaacatcaagaatgatgcggagccttccgccttcctctgcaaccgtcatattttttccgccgggcgcgatgtacacccatccgtctttcgcttcttcaccgttttccgcttctttgacctgaatatctgacaaatggttgagtctgtctgcaagtgaagcggtgaagccttcaggcatgtgctgaacgacaaatacaggcgcctttaaatccttcggcagtttcggaaccaccttttgcagagcccgcggtccgcctgtagaggtcgcgatgaatacggcctgcttggcggattttgctttcggtctttcaaatcccgccaaagccggacgttccgggatagaagactctttcactgccgcctcaggtttttgtgcgcgggacatcccggctgcaatcaccctctcaatcagctgctctttaattttataaagatcaagtgaaatcgctccggaaggcttagtgataaaatcaaaagcgcccatttccaggcagttgatcgttcggtccttcccttgctgtgtctggctcgataccatgatgacgggaagtttatatatgctgatgatcttccgcaatgtatccgttccgttcatgaccggcatttcaatatcaagcgtgacaacatccggtttgagaagctctattttcttcagcgcctcttccccgtttctggctgtcccgatgacttctatctgcacttccgcagccagaaaatcggtaatcatctttctcataaaagctgagtcatcaacgacaagcacacgaatcactgtaaagtcctcctcaataaaaaagaagataatctctcaataaatgccggtttctcttctcttggtttgttttcttccgtttgaaacaagacatccgtcagaagacggacggacctgctggcttttgcttgaggactttttattaaaaaaggcacctggtcaatgacggcttgacttactagcggatcatcgggtatggagccggcgaaacgcacctccgcgcctaaaaacgtgtggatcgcatgagaaaggcggttgtacgtgtccagcgcctgtttttgagcgcgggcgcgattgacggcaatgtttacggtcagccgttcatccgcgagcaaaagatgtttgatcgcgctgtacgcatccataatggccgtcggctcaggcgttgtcacggcgagaatgtcttccgccgataaaataaacggcagctgttcttttgaaagtcccgctcccatatcaaacagaacgtaatcaaaatcgcttaatacagcggaaagaccattcataaaagccgaccacttctctctgtctgcttgatagaacgcctcaagccccgttcctccggatatgtagcgaaggcctttcggaccggaggaaagtgattgagccaacgcgtgccgattctccatcacatcaataatggtgcgggaagaagcagctccgatcagcacatcaatgttgcccattccgatgtcaagatcaatgatgagtgctttttttcctttttcctgcagggcaactgccatgtttaatgttaaattagattttccgacgccgcctttaccgcttatgacggctaatgtcctcgcttttttctcataaagctccggcttgatcatttgcctctctctcattttccttcttaatgactctgcctgatcgggtttcatgccaaaagcatccttacaaactcttttggtgaagccgataggatgtcttcaggcacatcctgtccatttgtcaaataggcggcgccgattcttgattccgacagcacttgaaacacggagccgagtgaggcggtttcatccgttttcgtgaaaatgaattgattgaccggcacaccggaaaactgtttcagcacctgtttcatatcttcatattttgcagatgccgataatacgagaaaggattgtaagcctgattcaaacggaatcatctcttgtaattccgtaatatactgctcttctttaaagtttctgccggctgtatcaatgaaaacatggtcgtattcagcgaatttttccagtgccttcagacattcttcctttgaatagcatacttcaagaggagcctgaagcagctccgcatatgtcttcagctgctcgaccgcggcaatccggtaagtatccgtcgtcataaaggcaatttttttatgctctgtcagcattgatgaggccgcaagtttcgcaagtgtagtcgttttgccggccccggttgaaccgaaaagcacgacgtattttgattgaatcccttcctgccacctgtctgtcgaagggagttttttcactaacaaatcctgcagctttgagctgacattatcttcagttaaatctccggaaacaattgaagaactgagcaattcactgagtacagcgttttgcgtatgatcaggaagcccggcttgcttcaatagtctctcggctttttttaatggttcagggagcacttctttcaaatgcgccagttcgccggaaatactttgatccggaaggcgcggcggctgaacaggctcagctttctccgccgtttccgtctttttcatttcttcagcggcagccggcggcgtttttctcgcttccctgacgtcacgatctaaaaccgctatcacttcgacggcctgctgcgaccgcagccccagccattttcgtttctttacttgtttggaatgtaaaataacggcatcattgccgagttcctttttgatttgcttcgcggcatcctgcattgaagcggctgtaaatttttttattttcattaaatatccaccactccaatgctctgtacttcaacatttgcttccagctcattataagaaagaaccggaagatcagggaaataccgttctaacagctgttttacatacattctgacagcaggcgagcaaagaagaatcgccgactcctgacggatggaaagctgctcggcctctttagcgacagaacggatgatgctgtccgaaacctcagggtcgagtgacaggtaattgccctgttcagtctgctgaaccccgtctgcaatcgctttttccacccggcctgagcatgtgatgaccttcagcgtttcatgctctctcgcatattgtgccgtgatttgtttggcaagcgactgtctcgcgtattctgtcaaaaggtctgaatctgtcgttaatcttccgtaatcggcaagagtttcaaaaatggtcaccaagtttctgattgaaactttttctctcagcaatttggcaagcaccttttgaatatcgccgacagaaagagggttcggcgtgacttcctcgacaagcacaggataattttccttcagatgatcgatcagctgctttgtttcctgtctgccgaccagttcatgagcatgctgcttaattttttctgtaatatgcgtagatacgactgacgccggatcaacaactgtataccccagcatgtccgcttcatcttttgcagcttcgctgatccattttgcgggaagtccgaacgacggttcaatcgtttcaattccttcaatgacgtcatcttcaggcgtcggtgacatcgctaaataatgatccagcaggagctctcctttagcgacttcattgcctttaattttcaatctgtattcattcggctggagtgcgatgttatccctgatgcgcacaaccggaatgacaagtcccaattcaagcgcaagctgacgtctgatcatgacgatgcggtcaagaagatcaccgccctgccccgcgtctgcaagcggcacgagtccgtatccgaactcaaattcaatcggatcaatatgtaaaagctgcacaacgctttccgggcttttcagttcatccgcctgagcctcttcttcaagaatttcttcctcttcttcgctcggcttatccgctttggacagcatataagcgccgaatgcaagcagaccggcgatcggccccgtcagcagaatgccgatcggtgtaagaagaccgagcaaaagtacagttcccgcggctacatacaagagcttcggataagcaaacagctggcctgtaatatcatgaccgaggtttccttcagatgccgctctcgtcacgacaatccccgtagccgttgaaatgagcaaggccggcatttgagaaacgataccgtcaccgaccgtcagcattgtaaagtgagacgcagcttcttgtatgctcatcccctgctgcagcatgccgattacgattccgaaaataatattgatcatcacgatgatgatccccgcgatggcatcccctttaacgaatttgctcgcaccgtccatggcgccgtaaaaatccgcttcccgggcgactttttcacgtctgtgctttgcatcctgctccgtaatcatgccggcatttaaatccgcgtctatactcatttgctttccgggcatcgcatcgagcgtaaatctcgccgccacttccgatacccgctcggcgccttttgtaatgacgataaactgaataataattaagataatgaagacaacaagccctaccagcacatttccgccgacaacgaaattcccgaatgtctcaacaacctttcccccttctccgtgagaaagaatcgaacgtgtcgtcgacacattgagcgcaagccgaaacagcgtcaataacagcagcaatgacgggaatatcgagaattgcagcggttcttgcatattcattgtggtgagaagcacgatcaacgcaagagagatattaatgatgatcaaaatacttaacaaccatggagggaatggaatcaccagcattgccacaatgaggacaacacttattaaaaccgataaatctcttgttgacatgctgtttttctctccttttgaatctgaaattcgctatactttttgtttcgttttatatacataagccaaaatttccgcaatgactttgaaaaactcttccggcacagcctggtcaatgtcaacctgatcatataacgcacgcgcgagcggcctgttttcaatcgtcatgacatcgtgttctttggcgatctgcctgatttttaatgcaagatggtcgacccctttggcaacaatgtaaggggcggccattttcttttcatcatattttaaagcaatcgcataatgggtcgggttggtaatgatgacatccgctttcggcacttcctgcatcatccgcctcatcgccatttcccgctgcttctgcttaattttggacttgataatcggatcaccctccgattttttgtattcatcttttatatcctgctttgacattctgatatttttctcatagtcaaaacgctgatataaataatcaagcccggccagcagcattagagcccctgatcccgcaagccccatccaaagcgtgagcttagaaacgaaagtgagcacttccgcaggtgttaaaagcggaaggcggagaatatcgccataatgcagccagagcaccataaaggcggcaaaaccgaccacagtaatcttcaaaatggatttgaccagttcaacaatcgccctcatgctgtaaatccgcttaaatcctttcagcgggctgagcttattcaagtcaggcttgagaacttccgcagaaaacagaaaacccacctgcatgtaattgctcacgacacctgccacaagcgcgaccagcataatcggcgcgaggatgaggctgatatctttcaccgtatctacgaacagttcatgcacggaagatgctgacagatgtaatgatatcgatttcgtataaaacgttttaataaaggacagcagcctgtcccgcatataaggaccgagcgcgatcagcgaaagaaagataatcagtaaagaaacggctgtattcacatccgtacttttcgcgacctgtcctttctttcttgtatccttccgttttttcggagtggctttctccgttttttcaccggcaaagaattgcagattcagtctgagtctcatcatgtcacaccgaccaatgccaatagattccgcatggtttcaacggtaaggctgaagatgttgcggacgacgacaaacatcaccgccatacaaacgatcagcataataaagctcacggctattttcagaggaagcccgacaacgaaaacattcagctgcggcaccgttctcgccacaataccgagcgccaaatcaactaaaaacagactggccacaaccggcgcagacatttgaaaagcgataatgaacatggcattgaagctttttgcgataaaaagtccaaagtgatcatttccaaacgacggaaatgcctgatcaagcgggatatactgaaagctgtaataaatcccgtccaataaaagataatgggcgtttacgctgagcataaataacagcgccagcgtataaacgaattgtccgatcagcgggctttgcgttcctgattgcggatcaatgacattggcgatggaaaagcccatctgaaaatcaataaaggaacccgctatctgaatggctgtcatcatcatgaaagcaatcagcccgaggctcaagcccacaacggcctcttttatgacaagcagcatatactgttcccctatttctatttccggcgcatgtttcagcgtgctgaagcagatcaccgaaagaaaaaaagcaaagccgattcggtgaaccgccggcagattccgatgtccgaacaccggcaccgttacaaaaaaagcagagattctgataaagaccaataaaaaagcgggaaataaatcaatgatggaattcatttgattctaccctgcaaatcggttcagatgagagaacagatcagttgtgaacgaaagaatcgtcgacagcatccaaggaccgaaaaagatcagtccaagcatcaccgccacgattttcggaatgaacgcaagcgtctgttcctggatttgagttgtcgcttgaaagatactgacgagcaaaccgacgatcagcgcgatggcaagcagcggcccgctgatcattagtgttacatatacggctttttccgccatggaaattacaaattctgaactcacaattagcacctaccctaaaagctgtcaagcaaagatttcacgattaaataccatccatcgaccaaaacgaaaagcaatattttaaagggcagagagatcataaccggcggtagcatcatcattcccattgacattaagacgctcgccacgaccatatcgataattaaaaacggaataaaaatcataaagcccatttgaaaagcggttttgagttctgatatcgcataagcaggcaccatcgtcgtcaaaggaatatcctgaatcgattcaggttttttcattttggcatagttcataaacagcgccagatccttctgccttgtatgcttgctcatatactctttaatcggcttctcggcttttgtatatgcttcatcgagactgattttgttgtccatcagcggcgttaaggcttccttattaatctctgaaaaagtcggcgccataataaaaaacgtcaagaacagcgcaaggccgattaaaacctggttcggaggcatgttctgcgtcgccagtgaggttctcacaaaagacagaacgatgacgattctcgtaaagcaggtcatcaaaatcagaatccccggcgctactgaaaagacagtcaaaagcagcagtaatttaacagtggagctgacttcggtcggattgcttgaattaaaaagattaacgaattcattcatgatgataagggcctttcttctttccttcagaacggctttgtttcagctcgttcagctgttctttcagcgcttttgaaaacgacggaagcatcgtttgcggctttttttctccatccttacgcggatttacgagcttggtccattccacttttgaagacatcgactcttcgtattggctcagaatcgcctcgcgctctttttcatcttctatttcttttaaaagctgtatcgtttcgcccacaccgactacgagaacgctgtttcccactttaatcagctgcacggaacgattttggccgactgacgttccgccgatattttctacatattgaaacggcttcagcagacggtttcttctattcatcagtttgacaaatccatagatcagcagaatgacgaataataacgccccgatcatctttacaaaatcaaaagcggagacagaagatgcagaagcatcccctatctcttgatcagccgtttgtttcgatgtatcgctttttttctctgttttgtttgttgattgtttgtcaaaccattcgttgacggtggaattatcagactctgccgcaaaagcagggaacggatgtacattgagtaaaacgaaataacaaatcaaagctagtaaaccatgactctttttcaacagtcgtacaccctttagcttaatgttttattaatggcttcaagcacgcggtccgcttggaacggtttcacgataaagtcttttgcgccggcctgaatcgcgtcaataaccattgactgctggcccatagccgaacacatgatgattttcgcctgcggatcgatctgtttaatttcctttagagctgtaatcccgtccatttcaggcattgtaatatccattgtcactaggtcgggggaatgctctttgaatttttcgactgcctgcgctccgtctgaagcttcagctacaacgtcaaaaccgttcttcactaaaatatccttgatcatcattctcataaatgctgcatcgtctacaattaaaattctgtgtgccataatctgtttctctcctctatgttcgcttattttaaattgttaaggcggtctgcctgacttaaaatatcagtgactctcacgccgaagttttcttctatgacaacgacctcgccctttgccacgatccgctggttgaccaggatgtccacaggttcaccagccagcttgtcaagctcaataatgcttcccgcagaaagttcaaggatttctttgacgcttctcttcgttctgccgagctcaaccgtaacggaaagcggaatatccatcagcatatcaaggttattccttgatccttgcgccgcttcgttatgatcaaacgcctggaattctaccggagcgacttgaacaggagcagctttttttgcggttccctgtctcttcggaagctcgggttttgcctgcggctccggctgcatggcaggttccggctgcggcgtttcgtatgtttcctgtggttctgatgcggtttctgcggcctctgactcatgctggtccgcagtcatcaggtctgcgatcagatctttcgcaaacgtaatcggataaagctgcatgatgctcgaatcgattaattcgccgactttcagacggaatgacacttttacgagcaggtcatcctcaggtattctgtcggtccctttttcttccgtcacatccagaagttcaacccttggcggagaaatgtcaatctttttactgaatacggtcgacattgacgtagcagccgagcccatcatttgattcattgcttcctgcacggcgctcaggtggatttcaccgagtgacggatcggcgccccggccgtctccgccgatcatcaaatccgcgatgattgccgcgtcgctttgttcgacgacgagcaaattgctgccgtcaaagccttctgtgtagttcacttcaatggcaacatacggatgaggaaattcatcactgattttgctttttgaaatgacggtcacactcggtgtcgtaatgtccactttttgatttaaaagagtggacagcgccgtagccgagctgccgaacgaaatattcccgatttctccgatcgcatcgcgctcaagttcagacaagttcgcctcttgaggctgttctgtatcctctgactgactgcttgtgccgttaagaagagcatcgatttcatcttgagataatctattgttcatcttgttcacctcttatgtcgtgatctaaaatttgcactgcctgtcttcgattcacccggccggcctgccctaaaaacttcggtttgtttccgaccaatacagtaagaggatcagtcactgatttgtccagagttatacagtccccgacttccaaacttaaaaattcttctattgtcagttcagaagcgcccaagagagccacaacgggaatttgagccgtcatgatgcgcttttcaagcagcttcgtttcttcgggcttcgcttcattccggtctgattgcatccaataatgtacggaaagcttagggataatcggctcaagtacgacatggggaatacaaagattaatgacaccgctgatttcacctatctgtgtattgagagaaatgacaacgactgtttcatttggggaaaccatctgtacaaactgaggattcacttcaaattcagtcatttcagggtcaatatcagcaatcgattgccaagcttctttgtagttgcccagtgcattttcaaataagttagaaataatattcgtttcaatttccgtaaggctgtcagctttgttatgagtgatgccgatgcctcccatgacgcggtcaagcattgcgtatgcgatggtgggattaacctccatcatgattctgccttccatcggatgaacatcgaataaatttaaaatcgtcatgttcggtatggaacggataaattcttcatacggcacctggtcaactgagctgacggatatatgaatatacgttctgagcttggcggaaaagtgtgttgtgagaagcctcgcaaagttatcatgtatccgggttaaactgcgtatctgatctttcgagaatctgagagcccgtttaaaatcatatacctttacttttttctctttaacttcctttttcagctcttccgcatccgcctcacccgtggaaatggcggaaagcagtgcgtctatttcattttgggagagaacttctcctgacattttcttcacctccgtattctgtcaaatttgtttttattgcagattaaaggaggtaatgtacactttctgaacttttccttcttggagatagctgtttactttctcttttaatgattgtttaaacgcttctcttcctttatctccctcaatctctccggcgcttgtgtcagctaaaatggaaatgatgttgtctttcacctgaaaatcgcgtttttcaagttcttccttcgctttagccgagtcggtttcaagcttgatgccgatacggatgatgctgtcagactttaagtttgtcgtgatatcgtcgacagacacagtggctgcaacgacttcgtcaattgtcggctttttatctttgccggaatgtccgctgacgacaaaatatgctgccgttccgaggccggcgatgacaattaaaataatcagcaaaatgatgactaattttttcttcattcttcttcctctattccctgatccagtgaaaatatttgtatgctatggtaaaacgatatgacttttttgagaactgcttcttccggttctttcacaacgaactttttgccgttggacagtgtaatcgtcgtgtcggggaagcactcaatctgttcgataaacagcgcgttcagcgtaaaaggctggccgtttaaacgggtgacttgaatcatgcaatccggagaagcggcctaaccgcctctcctccctccttaccgtttcagattaaccagctcctgaaggatttcatctgaagtcgtaatgatttttgagtttgattggaaaccgcgctgagcaacgatcatttcggtaaattcatctgtcagatctacgtttgacatttcaagatagcctgccaaaagcttacccgttccgttttcgcccggagtggtgactgcgctcgcagctccggaacttaatgattctctgtaaaggttgcctccgattttttccagaccggcgctgttagggaacgtgaccagaccgatttgtccggcatcatgaaccgcatcccctgcatcagtgtatgtaacggttccgtctgcaccgatgctgtaatctttcgcatcagtcggaatattgattttgccgccgccgattttttcaaggtagtacccgtcagtcgtaacaaggttgccttgattgtcctttccgaaattccccgcacgtgtgtaaacgattcccgaacctgtattaatctgaaagtagccgtctccgtcaatggctaggtcggttttattctgtgtagcctgcggggcgccggttgaatgaacgacatcaatggaagaagtcgcggcacccaggccgatttgttttgaattggtcacgtttgaaccgccggcgactgtctggctgatcatatctttaaatgtaacgcggcttttcttaaatcccactgtgttgacgttggcgatgttattgccgattacatctagttttgtctgaaagtttttcatgccgctgataccggaatataatgaacgtaacatgttaaattccccctgggtttctttttatttagatgtttcgctgacggccgtgacattccacggactgacctctttgccattttcaagcacgagcacgtaattgccgtttgaatgcttgactgaattgactgggcttgtctgatccttcccgtcgctgtcgctgaatgtgacatttttgccgatccagttcacatacatcgtaaacggatcttgattttctacaaatttagtcatcgtcgtattcatattcatcatttgttccaatgaagaaaatgtcgccatctggctgatgaattctttgtcatcaaccggattgagcgggtcctggttttgaacctgtgtcattaagatcttcagaaattcgtctttccctaaattcgtactgctgtttactgcggaggtgctcttcgcgtttgaagtggttgaagcgcccgccgcggcataatccgagtttactgatgtcacctattcttcctccatttcattgagagaaagctcctccagcatatctccgaaatcgcctgactgctgcttgttcttctgctctctctgtccctgatgctgctgtttattgtgatcggccgtctgcccgtaaacaggctgctgatccccgccttgaagcgggactgtaaaacggtcgacctggaccgacatattcggaagcgactgtttcagctgaggaagatgctgttccagcagctctttcgcggactggctggatgcgattattttgctttgaaacatcccgttttcgtttgtcaccttaattgtgacaaatccgaggttctcgggattaagacgaatcgtaaagcttccggttgttttcccgaaaggcgtgtatttcatctgtttccagccgctgatgacctgatccgttaacggtttattttctgccggctgctgttcagctcctgcggacgcttgctgaatgccggcaaggcttctcgttcccgaaaacagtatatgtgcagacaatttgctgtcaggcgcctttgcgtgagaaaccgtgccgccgttttgctgttccgttttcccggctgactcttgggatgattcagatgattgagataacacaaaagctttcagctcagtttcagccatatcccattcctttgttcccttttgagaaaggcccgcaagctgctccgcgacgctttgaaagctcttcagctcagcggctgtcatggagtaaagtttagatgcagattcgtttttcggaaaaaatgtctgccgcaggtcttgaatcacgcggtccggaacaccttgttttttcaatgcctctaataaacgggcgccttcctggtaaaccgcctttgcctgcgtgctgtccggcagttcctgctgagatgtgaagagctggaatacggcttcttgaatgaaaagcaggcccttctcaagcgcatccttgacggaatccccgtcttttgcggaagaatccggctcattcgtttcaggcttcgccccatgctgttttcccgctaacatgtcttcaacggattcggcaagctgtttcaataaaggaagagctgtttcagccgtctgctttccttcaagagcttttaccgcctcaagcagctgtttaagctgcaattctttatcttccgggccggctttcagccaatcaccgattttcgatagggcatcattcagctctgcgtcacttgtttttgtttcatctccgggctgccggggagaagtgatttccgacaggagccagttctgaaatagacctaagctgtttacattcatcttcacattgctgttttgcgcagtctgcgtacgattacccgttaattcaagcagcttcaacttacatcactccttatttccgtcagcggatagtttttctgtatatttagccgcttgttcaggagtcattttcgtcaagatttcagcaagctgctttttacttaatccgtttaaaatatcgagggcttctttttctttcagctttacgataatgcttgccgctttaccgctgtccatacttttatagatgttgatcattttatcttttccggctgaatccgaagcgtcttttttcgtttcatccgtcttcgttttctgctgctgttcagcttcctgtttcagcgaacggattttctgattcagattatcgatttcggacttgcttgtatctaaatctttattcaaaatgttaatttcacttttttgttcctttatggtcttttcaagagaagccgttctgtcttccttctgcttttccgccgcgcttttcatttctttcgtttcgggaaccaattcttttaaaacaggcgttttagcggctgtttcctgaatcggcttcatcacatcaacgccggcagcccaaaggatgatgcttgcgacgatgatcagaaaaatcagcgggatcatgataaaaagcaggattgaaccgaactttccagatctcttttctttttcggccatttcattcgctcctaatgcccctgaatcataaactgcttgattgaaatgtcatccatttccctcatctctgcagctttgtcttcaagtgcgaacatattaaattgtttttcccgcattttttcaaatttctttacttcaatgtttttttcggtgagctgttcctgcttctcattcatttcatttcgtttcatgatgacaagcttttgataatgatagatggtgttctcaagattggaaacgaattgctgataatgtctcatttcctgaacgctcatcccgcatttcagctttgattctttgtctttttcgagcaattcttttttgctcatattttcatatagtttttcagccactgtctcaaattcagaaaccgattgtctgtattcagtcaatgtttggtctttttcattttcttttaattccagcagcttttgaaatctgaattggtacgccatgatgtttattcctcttttcctgtcagactcgtcaatgccgcaatgctgtcttccaattgagcaggttcttccgttccttgttttaaaaattgaataagctgcggataaaactgaatcgcttcatcaatttctcttgatgaccctcttttgtaagctccgatattaatgagatcttcagagttttgataagttgacagaagatcgcggaatttgttggccgcctctatgtgcgctgtgtctgaaatattagacatgaccctgctgatgcttttcaggatgttcacggccgggaactgtcctttgttggcaagcgcccgatcgagaacgatatgcccgtctaatattccgcgcaccgtatcggcaatcggttcgttcatgtcatctccgtcaacgagaaccgtataaaaagcggttatcgttccttgttcatttgcgcccgttctttccagcaaacggggcaaaatagcgaacacagaaggtgtatatccctttgttgtcggcggttctcccgctgccaggccgatttcccgctgagccatcgcgaccctcgtgacggagtccatcatgaacatcacattccggcctttatcgcggaaatactccgcaatggcggtggccgtatacgccgctttcaatcgcattaacgcaggctgatcagaggtcgcgactacgactatcgagcgtttcaggccttcttcgcctaaatccttctcgatgaattcacgcacctcgcgcccccgttcaccgacaagtgcgataatgtttaaatcagcttcagtctgcttcgcaatcattcccatcaaggtgctttttccgactccgcttccggcaaaaatcccgattctctgcccttttcctaccgtcagcagactgtcaatcgatctgacgccgacacccatcttttcccgtatcggcgggcgtttcatcgggtttggcggcggctgttccgtcgaaacgggggacaaacctttcggaagcgcccggccgtcaagaggttcgccgaacgcgtcgacaacttgtccgattaaacccgcccctactttgatgcggagcgactcgccagtggcctccacaatgctgcccggcgctatgctggccgcttccagataaggcattagcagaatgttttcatcctggaagcctacaacctcagctttaatcgcttttttcgcatggcctttcggataaatgagacaaacatctccgattgagctttcgggcccttttgattcaatcatcagcccgatgacccgtttaaccttgccgtagcgtttgtacggatccgctgtttcaattgagtctattaaatactgtgtcttcattgctccgctcccgcctcaagcgccgttaaaagcttttgctttaattgcatcagctgagtgtctatgcctgcatcaacacgtccgaacggagtttctatcgagcacgttcccttcgcggctttttcatcggcatataagcttaatctgcattctttgtataacagctgctgaatttcgtccatatgctgatgaaccgtctcataatattcagggtccacatagatggagatgtcatcataatcttttacttcggctactacctgtttgaccagcagaaggaaagcctctttatcgtcacttttttgccgccatacttttttagcgagcgcaacagaaagctcaataatttcttcctcagcgctttccagtttttcctcgactgattgtctggccatttccataacggcattggcccggctgatgagattggcatattctgcttgagcatcggcttttcccaatgccatgccttctttatatccttctgccttcgcttcttcaatcaatctttgtttttcttccgcccagcggtttttctcttcttcaatctgccgaagagtgtgatccaattgacttttcgcttcttcagacaccctgtcggcttcggccttggcaaaggccatgagtgcctccggattttcaggttcctcccggtctggctgggaatgtgttttcctgacttcctgcaaggatagcttgcgccgtttttgttcaggagaaaatgatgtttgctgtttaatgatattagacaataatatcgtctcctccgcctcgcgcgattacaatttctccggcttcttccagcttgcggacgacgcccacgattcttgattgcgcctcttccacatcacgcaaacgcacaggccccataatttccatttcctctttaaatgtttcaaccatacgctgtgacatattgctgaagacaatctctttgacttcctcgctcgcaaccttcaatgaaagcaggaggtcgtcgttttcaacatctctgatcacgcgctgaatcgcacggttatcaagggtgacaatatcttcaaagacaaacatccgttttttgatttcatccgccaattcaggatcttggatttctaatgaatcaaggatcgttttttccgttcctctgtctacgccgtttaacacttcaacaacggcttctatgccgccggtctgcgtataatcctgcgtaaaggaggaggacagcttttgttcaaggacccgctccacttcatttatgatttcaggagacgttctgtccataaccgcaatccttcttgccacctcagcctgaacgtccgggttcagctcagacaaaatctgtccggcctgcaccgggtcaaggtaggataaaatcagcgccatcgtttgcggatgttcctgctgaatgaaatttaaaatctgttcgggctccgcttttctcgcaaaatcaaacggctttacctgcaaagaagaggtgagcctgtttaaaatgcttaccgctttgtcttctccgagcgctttttcaagcacttggcgggcgtaatttaaaccgccttgtgaaatatagtcctgagcgattgcgatattatgaaattcttcaatgatttcatcttttctttgatgatcgacgcttctgactcccgaaatctcgagagtcaacctttcaatttcttcttcagacaaatgcttgtacacagaagctgatacatcaaggcctaaggaaatcatgaggatggctgctttttgttttcctgtaagcttgttctgatcacgtttcgccattttccattccccctaatcctcgtccagccagcttcgaagcaatttagcaaagtcttccggtttttctttagccattttttcaagctgttttcgtctgactgtttcttccgtttcaattttctcttcgttgatatcaggcaatcgaaccggctccggcggtgtttcatattcatattcttcgtattcatcctcttgtgagcgtttctttctgatgaggagaatgataagcagaataatggccgcaagcagtacgccgcctgtaatatatacccagatcggaagacctgaagattgtgccgaatctgtgttcaggcttgtttttccgtcaaacggctgaacggatacaacgattttattgttgatatcattgtctgtcaggttttgattttgcgtttcgtttttatcaagagacgttctgacgaccgttcctaaaatcttctgtatatcagcctgtctctgtgccgataaggaagcggcatttttcggattaggcggctccaccatgacctgaatgcctaaatcacgcactttatacgggctttccgcgatttctttatgaatgcggttgacttcatagttgattttattgctgcttttttcgtagtccccgctgtttgaaccgccgtttgtctcggcatagttcgcggtgtcattgcttcccgttccggccgtgccgccgttggccgcgccatcgcctttatacgtttccgcgactttttcggcgcttaccgctatgccttccatgttatctttatcgacaggttcgacagtgtcttcagtgcgtttttccttcgtgaagtcaatatccgccgttacagaaacaacgaccttatcctgccccatcattgtgccgagcagtgactgaacatgtttttgaatgtccttttcgacctgcgacttaataccttgctgagatgcataactgtcagaaacggaccctgcaccgctgtcacttttgtcataatatgtagaattttgatccattatgacgatattatcttcttttaagttcggaacacttttagaaacgagatggtacagcccgttgatctggttttgatcaagcgagtagcccggtttcatctgcaaaacgatggatgcggacgctgccggctgatcttcaccgacgaacacggcttctttcggcatattgatcatgaccttcgagcttttaataccgtccatttcatttatcaggtttgacaattcggtctgagtcgcctcaacctttaaaacgtcaaactcattatctgtcaggccgaagcccgcattttgtccgaaaaacgaataatcaattgatcccgttttcggcaggccttccgcggcaagctggactttaagcgaatccacttggctctcaggaacctttatgaccgtgccgccgtcagcaagttcagaagacacctttttcgtatcgagctcttctttaatcttccccgcttcttccgcggacaaatctttataaagaggcaccatcttttcagacgaagtaaaaataataacgacgatgagtaaaataatgaatgcggccaagccgcttaccatgagtatcttctgtgtttttgatctgttgttccaaaacgctgccgttttggttttcatttgcattagagtacgattcatgttaacccccggtcattccagtcattctcttcaatctgaccactacatctgcattctcatgatttcctgataggcttccacggctttattgcggaattcggtagcggccgtcagagaaatatttgctttttgggcagcgatcatgacctcgtcaaggtttacatcctttcctgcagccagttcgttcgttatttggtcagattttacttgtgactcatttaacgaatcaatagagttttttaaaagctccgaaaagcttgtttggtttgaagaatcagttttttgagtttggtttaattgattcgttacgttttgagtgttttgggtttgttgaagctgaaaaggagtaatagcgttaaccacttacatcaccttactttccgatttctaaagcctttaaaagcatgcctttggaggcgtttaatgcagttacgtttgcttcatatgatctcgtgctgctgacaagatccaccatttcttttaatgggtctacatttggtttttgtacatatccgtctttattcgcatcaggattctccggatcataaacgagattaaaagcggacgggtcttccgtaacgccagatacctttacgccatttcccgcgcttcctgttccgttcatcttggaatgtaaaagggacgaaaatgattcgcctccggattggagagataccagctttcttctgtaaggcacccattcgccatttacctgcttcgctctcgttgtgtccatattggccaggttggacgatacgacgtccatccggacacgctgtgcagttaaagcggaacccgaaatatttaagctttgaaagccactcattattttcctcctgtcaagacggttttcagagaattgaatttgccgctcattctttcaaccaaagcctgataattaatttggttttcggctaaatctgtcatttctttgtcgatatcgacattgtttccgttttgctggtacgatgtatcactgctggacacgatagaataatcgtcccttgaacccgtaaagtcaacgtgccgatagtcggtttttaccgcctcaagattggatgtttcctgatctaacaaatttcggaaagagactttttttgccttatagttcggtgtatctatattggcgatgttattagttaagactttttgcttaatgtccgctctccccaaggcattctcaagattttgtatagttccagaaaataagtccaaatccacttacctccatttcagatatttttctcctaaaaatccttgtcgagaattgtaaaaccatatgcttattgtaagaaataacaggcttaaagtctatgaagttaggctaaaaaaaagtgctcaattatatctattttgcatgtaggtattaagtcctagagtatttggactacaagtatttgtttaatataagactgaaaatagcagaatttctgtatcttcctccttttttcacacagcaagatggattatctcagatcagcttccaataagcaactttaaactgcaacttttcacctattgtccataaaaaaagcaggacccccattttcagggatcctgcttttgtcttaatgagatttaaggttttccaattcaataaggaatttgttgttcagaactttaatgtacgtccccttcatacccagagatctggattcaatgacgcctgcgctttccagctttctcagcgcgttaacgattactgaacgcgtaatgccgacacggtctgcaatcttacttgccacgagcaagccttcgtttccgtcaagctcttcaaagatatgctcaatcgcttcaagttcactgtaagacagagaactgatcgccatttgaacaaccgctttgcttcgcgcctcttcttcgatttcttccgctttttctcttaaaatctccattcctacaacggttgctccgtattcagcaagaatgagatcatcatcttcaaattgatcctgcagacgggacagaatcagcgtgcccagtctctctcctccgccgatgatcggcacgatcgttgttaagcccgcttggaacaggtctctgttttccacaggaaatgccgtgtattcgctgttgatatcaaggtttgaagacgtctccggaacattgaacagatttctcgtgtactcttccgggaactggcggtcttcaagcatttttttcatgcggtcattttcaatctgctgattaatagagtagcccaaaagctttcctctgcggctgacgacgaaaatattagaatcaatgacgtcacgaagcgtttcagccatttctttaaagtttacgggtttgcctgccgcagcctgcagcatgctgttaataattcgtgttttttgtagtaaagccatgataaataatcctcctagaattcctcttattaaattttcacaatataaattgacttagatctttgttgtttgcaatcgttccgagcttttcttcaacatattgcggcgtgatggcgactttttccatcgtcacgtccggcgcttcaaacgacaggtcttccaagagacgttccaatatcgtgtgaagccttctcgctccgatgttgtccgtatcctgattcacatgataagccacttcggcgatcttacgaatagcttcgtcagaaaattcaagagatataccttctgtctgcaataaagcctgatattgttttaacagcgcgttatcgggttcgacgagaatcttcacaaaatcatccaccgtcagcttgctcaattctacacgaatcggaaagcggccctgcagctccggaatcagatcagacggtttggccatatggaatgccccggctgcgataaacagcacgtgatctgttttgacggagccgtatttcgtgacgacggtagatccttcgacaatcggaaggatatctctttgaacgccttctctcgatacatctgctgaggaagaagcccctccgttttttgcaattttatctatttcgtcaataaagataatgccgccctcttcagctcttaacacggcctcttggccgacttcatccatatcgattaatttgcctgcctcttcattggtcagaaccttccttgcttctctgaccgtcattttgcggcgttttttcttttttggcatcagattgctcagcgcatcctgcatattcatgcccatctgctccatcccggagccttgcagcatgtcaaacatcgacggctgctgctcttccacctctacggagacgtaatggtcttcgagctctcccaatgcgagctgatgcgccatgcgttttcttttttcttcaaggcttgcttcttcctgctgatcggcttcatcatcatttgccgtctgacttcctccgaaaagcatttcaaacggatttttcacacccgcttgttttttctttcccggaacgagaagccgcacgatacgtttgtttgcattttcttcagcctgttctttcacttcgctgattttttcttctttaatgagccgcacggatgtctcaacgaggtctctgaccattgattcgacatctctgcctacatagccgacttctgtaaattttgtcgcttcaatttttataaatggcgcaccggtaagcttggcgatccgtctggcgatctctgttttccccaccccggtcgggcccatcatcaggatgtttttgggaacgatctcgtctctcagtttttcatcaagaagacttctgcgatagcggtttcttaatgccacggcgacagcttttttcgcatcctgctgtcctacaatgtattgatccaaccgatctacgatttgtctcggtgttaacggtttgttttccatgcgcctcaagtcctttctattcaagttcttccaaaatgatctgatcgtttgtgtacacacaaatctcgcctgcgattttcaaagcggcttttgcaatatctttggcggacagattctctccggcataggttttcagcgctcttcctgctgacagggcgtagtttccgccggagccgattgccaaaattccgtcatccggctcaatcacttcacctgttcccgatacgagaagcaaggtatcctggttcatgacaatcagcatggcttccagcttgcgcagcactttatcgctgcgccattctttcgcaagctcaaccgacgcacgttttaaattgccgttgtattcttcaagcttcgcctcaaacatttcaaaaagtgtgaaagcgtctgcaacagatcccgcaaatccggccagaacctttccgttaaacagctttctcacttttctcgcggtatgtttcatgactacagcctgaccgaatgtgacctggccgtctcctgacatagcgcttttcccgttatgctggacggcaaaaatcgttgtcgcatgaaaagatgacatgagaagggcctccttttaattttctttaaaagctctcgggtggtgggacatatatgtgtttctcagcatttccttcgatacatgcgtgtatatctgcgtagaagacagattggaatggcccaaaagctcctggacgcttcttaaatcagccccttcattcagcagatgagtcgcaaacgtgtgccgaagcatatgcgggtgtatatgtaaagtgccggatgctttttttacaagcccgcttaaaatataccggattcctctggcggtcagcgggccgcctctttgattgacaaacagcacatcatgaggctcttttgctttttcaagcaggcactgccttccgctgttgatatacagctccagcgcatcacgggcatatgagccgaacgggatatagcgctgcttcttgcctttcccgtgaacgagcaccgtatccatgaacaggtcaagatcgccgacagtgagcgtacagcactcactgaccctcattccggtcgcataaagaagctcaagcagggcctgatcgcgcatccctgacggctgacttctgtctgagacagcgaatagttcctcaagttctttttcataaagaaacttcggaatccgtttctcttgtttcggcagatgaacaagctgaaacggattctcttcaacaagcttttccctcattaaaaatttatagaagcttctcaaagctgaaattttcttgctgattgttcttcttgacaggcctttttcataagcctctgtcaaaaatattctcacatcatgatatgcagcttctttcattccatttatattttgagcatgcagaaacatcccaaattcttcaatcgaattaacataattcacaatagtatattgtgaataatttttttcaatttgtaaatattcaacgaataactttaaaaaaaagttaacattctcagtcattatgaagacctccctctccgaagggcttttaaatggtatcatataatgcatcgaagttgcaatgaaaagctatatcgttttcgaaatagtttgaatagtctcaattgcgcgtttagcgtattcttcatttcgttcttttttgtttttaatttttacaggcaattcttttaagaggccgaagtttgcattcatcggctggaagttcttctgatttgtcgtcgtaatgtagtgagccatgcttccgatcgccgtctcctgcgggaatgtcacaagatcctgaccgagcacaagtttggcggcattgattcccgctacaagacctgaagcggcagattcaacataaccctctacaccggtcatttggcccgcgaaaaacagatcgttccgctgtttaaattgatatgtcgggttcaaaaggctcggcgagttgataaatgtgtttctgtgcatgacgccgtatctgacgatatcaacattttcaaggccggggatcagtttcagcacttctttttgatctccccattttaaatgtgtctgaaaacctacaatattataaagcgttcccgccgcgtcatcctgtctgagctgaacgactgcataagggcgcttgcctgttttcggatcttccagtccgaccggtttcatcggtccgaacagcatcgttttcttgcctcttttcgccatgacttcaatcggcatgcagccttcaaagaagatttctttctcgaattcttttaaaggaaccgtctcagccgtcgtcaatgcttcatagaaacggtcaaactcttcctctgtcatcgggcagtttaagtatgccgcttctcccttgtcataacgggattttaagtacactttatccatatcaaggctgtctttttcgacaatcggcgccgccgcgtcataaaaatacagatactcttctcccgtgagctctttcagctgctgtgaaagcgattctgatgtaagcggtccggtcgcgataaccgtcgggccttccggaatctctgttacttcctcagtaagaaccgttacgttcggatggtttttcacgagatccgtcacgctttgcgcaaattcatggcggtcaacggcaagcgctccccctgccggaaccgagcatttatcagcagattgaatgattgctgagtcaagcgcccgcatttcttcttttaatacgcctaccgcattggcgagtgtatttgaacggagggagttgctgcataccagttcagcgaatttatcagtatgatgggctgccgtctgcctgacgggccgcatttcgtatagttttacttgaattcctcgttttgcaagctgccatgccgcttcacttccggcaaggcctgctccgattacattaactgtttgctggttcatttcttttcatctcctgttgtttgtcccttccacacaaagaaggtgagcaaggctctgctcaccgctacttctgtggttcttccttataatcgcattcgacgcattggacttgtatgccttttttaagctttttctctacgagcatattttcacatttcgggcattttcgttcaatcggtttgtcccaagatacgaagtcgcattcaggataacggtcacagccgtaaaagacgcgtttcttttttgattttcgttcgacaatatttccttcatggcacttaggacattttacgccgatttgtttaacaatcggttttgtattccggcagtcagggaagttggaacacgccataaatttaccgtatcggcccattttataaaccatccgggagccgcataattcacaatcttcatctgcgtattcaggttcaatttccacttctttcatttcagcttccgcttttttcacgcgtttttcgaaatcggtatagaagctgtcaatgatttgaacccattctgtctcgccatcttcaacatggtcaaggtccctttccattttagccgtgaattcaacgttgatgatttccgggaaaaactccatgataagatccagcacgatctgcccaagctcagtcggcacaaaccgtttattgtctaatcccacgtaaccgcggcgctggatggtgtcaagagtcggcgcatatgtcgaaggacggccgatccccagttcttcaagcgttttaaccaggcgcgcctctgtgtaacgcggaggcggctgagtaaagtgctgctcaggctcaatatcttttgataaaaccgtgtctccctctttaaggtccggaagcatgcggtctttttcttccagctgatcgtctttaccctctacatagactttcatgaagccggcgaatttgactttacttccgtttgcccggaatgtcaatccgttattgctgagatcgacgctcatcgtatcaagtacggcaggcgccatctggcttgcaacaaaacgctcccaaatcagcttgtatagtctgagctggtctcttccaagcaccgcttttaagtcggcaggttttctgagcaccgaagtcgggcggatcgcttcgtgggcatcttgagcgttttcatttttctttgccggtttccgttttcccgctaagtactcttttccgtatgcctgatcaataaaagctgacgcctcttcaacggctgtattggaaatccgcgttgagtccgttctcatatacgtgatgagtccgactgtcccttctttgccgagatcaattccttcatataattgctgagcgatcatcatcgttttcttcgctctgaaattcagcttcctggcagcctcctgctgcagagttgacgttgtaaacggcagagcgggatttcgtttgcgctcttttttcgtcaccttgtcaactgtatacttattgcctttcagctgagcaaggacggcttttacgtcttcttcgctttttaaaggaagctttttgccgtttttcccgaaaaatccggcttcaaacgtctcttttccctttaaaaatgagccggtaatcgtccagtactcttcaggtttaaagtcattgatttccttttcccggtcgatgatcagccggagcgcaacggattgaacacggcccgcactgaggcctttttttacttttttccaaagaatcgggctgattttgtatccgacgagtctgtctagtatgcggcgcgcctgctgcgcatcgacaagatccatgttaatcatgcgcggatgtttaaatgattctttaatggcgtctttcgttatttcattaaagacgacccggcagtccgagctgagatccagatcaaggctgtgtgcgagatgccatgcaatcgcttctccttctctgtcggggtcggccgcgagatagactttttttgctttctttgccgctgtttttaattcttttaaaacagggccttttccgcggatcgtaatatatttcggttcaaagttctgttcgatgtcaactcccatttgacttttcggaagatcccggacatgtcccattgaagctttgactttatatttcttccctaaataacgttcaatcgttttcgcctttgccggcgattccacgatgactagataatcagacattttcatccccctcaagaggtgttctctctcttttcaagtatcaattcattttagagctgcctttttatggctttcaacatttcattctttatgatgaacgtcattttatacatgaaaataatatgcaactttaaatcctcactattattaaatattacaataccgtttgtcaaacgatatttcaaaagggttccgtatactgaacgcatcgggcggtcagctctccgtcaatatcctctgcgcataatacagctttcgccccttcttgaatgagttttataggtcctccggaatatggattaaatatggaacccggaacggcaaatacctctctgccttgatcgagggcctggtaagctgtgattaatgaaccgcttttttcttttccctgcacgaccacaattccttcacttagtccgctgattatgcggtttctcatcggaaagtgccattttttcggctttgtttcaggaggatgttctgagagtaggagatggtgttcagccatgtattctgctaacaggagattttcccggggatagatgtgatggaatccgccggctatcacgccgatcgtaagcccttttgccctgatgctcgccttatgagacaaaccgtctataccggatgcaagcccgcttacaatgacccagcctttttttgagagttcggcggaaagatgcccagccgcttttattccgtcttccgtcggtttccgcgttcctacaatcccgatttttctgcctttttcaagaagcggtgtgttcccttttgcatacaagacagccggcggatcataaatcgctttaagccatgttgggtagcagcttgatgaaatcggaataacagtaatgccttcgcggcggtaatcggacagaacttcatcaagttccggatccttgcgctctatttcccgaaaaattgcttccggggctgttttcccctctgataaaacagttaatggatgcggatccgaaaaaaaagacagagagtgatcagctttccaccattttaatagaagagacggggaaatgatttgattaatactgcagaccattaaacagcgcgatgcttgatccaaatctggcaacctcctcttttttcagcaaaaacaggaacagccgttacggctgcccctgcttcgatcagtgcgttttgcacgtttcaaataagcctttttcttttaacaccttaatcagcgtttcacccattacagaaggggtttccgcgacttcaattccgcaggcgttcatcgttttgactttttcttctgccgtgccttttcctccggagatgatggcgcccgcatggcccatgcgttttcccggaggcgcggttttaccgccgataaagccgacaacaggcttcgtcatgttcgctttcacccactcagccgcttcttcttcagctgtgccgccgatttctccgatcatgatgacggcatgtgtttcaggatcttcattgaacgcttttaacacgtcaataaagttcgtgccgttgaccggatcgccgccgattcctacagcggtagactggcctacgccggcttctgaaagctgatggacggcctcgtatgtcaatgttcctgaacgggatacaacgcctacatgaccctttttatgaatgtatcccggcataatgccgatcttgcattcttcaggtgtaataacacccgggcagttcggccctattaatctcgttttcttgccttccataaagcgcttcactttcaccatgtccaaaaccggaatgtgctcagtgatacaaatgacaagatcaatttccgcgtcaaccgcttccataattgcgtccgccgcaaacggagccggcacgtaaatgactgacgcatcagcgcccgttgtatgaaccgcttctgcgaccgtattgaataccggtacgccttccgcttccgttccgccttttccaggtgttacaccgccaacgatattcgtgccgtattccagcatctgctttgtatgaaataaagcggtagaacctgtaatcccctgtacaataactcttgtatctttattgataaaaacactcattatctggtcccctgcctttcattctttcctaaactaaggatacgattttctgtgcgccgtctgccattgattccgcagatgtgatgtttaagcctgattcattcaggattttctttcctaaatctacgtttgtcccttcaaggcgcacgaccagcggcaatgtcaatccgacttgtctcgtcgcttcaacaacgccctcggcgatgacatcacacttcatgatgcctccgaaaatattaacgaaaattccttttacgttttgatcggaaagaatgattttaaaagcttccgtcactttttctgcggttgcgccgcccccgacatcaaggaagtttgcaggttctccgccgtagtgtttaatgatatccattgtagacattgcaagacccgcgccgtttaccatacagccgatatttccatcaagggaaatgtagcttaaatcgtattttgacgcttcgatttctttcggatcttcttcatctaaatctctgtattccataatgtctttttgtctgtataacgcattgctgtcgaagttcagcttagcatccagcgccatgacgtttccgtcccccgtaacgacgagagggttgatctcggcgatggagcagtccttctcaacaaatgctttatataaaccgagcataaatttagcggctttgccgacaagctctttcgggatgttaattgcgaatgcaatttcccttgcctgatagccctgaaggccgacagccggatcaattaccgcttttttaattttttcaggtgttttttccgctacttcttcaatctccgttccgccttcttcagacgccattaaaacgattcttgaagtagcgcggtcaagtacaagcccgacatagtattcctttttaatatcgcagccttcttcaataagtaagcgttttattacttgtccgtccggacccgtttgatgtgtgacgagcgtcttgcctaacagttcttcggcatactctttcacttcatcttttgtttttgcaatctttaccccaccagctttgccgcggccgccagcatggatttgcgcctttacgacataaaccgagcttgacaggctctctgctttttcaactgcttcctctgctgtaaaagccactttaccttcaggaacagacaccccgtattttctgaggacttcttttccctggtactcatggatattcatttcccatcctcctaacttatgtagcaaaactaaaaatagactgcgctttcattctatataatactggaagaattgtctagggttcaaaacaaaatctttatatccttccaaacattctaacttttattttattgaaaatataaatttaaacggagtccgggaaatgaatggtccttatttttcgtttttcagggttttgtccagtctgtaaacaaatgaaaaaatttcggcaacggtttcatagagcgcctccggtatgtgatcgtcaaccgtcaaatggcgcattaattcgacaagggttctgtcttcctgaatggggaccccagccttctcagcttcttttataatattttccgccacgtgccccctgcctgttgcgacaaccttcggggcttggtctttctgccggtcgtaatgcagggcgacagctcttcttaacggcgtttgctctttcatattttcacatccacttttcttccgccgtctttttctataaactcttccacaagagcgctctggtctttcgggcgccgttttttagacgtgacgcctgacaggctgaagcccgtttcttttacggcttcttttaaagccggtacgagagggtcgatggccgcctgaagctcaaaatcagtctcaaccgtaatggtcattacattttgctgaatcacgcagtccacaacggtttcttgcagtgtttcaagatgcagcaaaaacaggagcctgcaatgtgacggatcgagttttccgtccggcttcttccgtcctttaaagagaactgtgatgtcattctcatacgcggacgctcccagcggaaatgacagcaccatctgcgtaaaagaagggttatgctgctcaataaacagctggccgtttaatttatgaataagcggttccgcctcttgtttaacggattggggcgcttcttgaagcgtccggacggcttggagggccgttttcagcgcttgtttctccggctgcggagatacgcctttttcaagcgctgtaatgaatgataattcatcacgcgtgcccaatccttttttgattttctgcaaaaggcttaatacatcatgtttttccgcatatttcaattcggtgagctgaacggctttttcgaaaacagccgcctcctgttctgtcagatgtgctttttgaagaacaggtgctgttttaaatgttttttcttgagaaatgaaagccttaatgatctccgccgttacttttacggggcggttttcagttttttctgccgatgtcattaatttctctataatctgttttgccgttttttcaggaagtttttgatctgtccgcgcactcggaggagaaggttggcttgagactgcctttccgttttcacgagtctctcggacaaatggtgattgttttgattccgtccgttcttcttcatccatcagcccggtttctgggatcggcatgcgtgcagcctcggcaagcttcttcaagagacgttctgcatgaagatccgtttccgcgtttaatacgtcagaaaccgcctctttgagcacagacagctcttttgccgattgcggtgcctgattgattgcctgaagcagtcctgagaggaggcgccgggtcggaaccggatatttaacggcatgaatggctgacaagacttccggatgtgcgggcagttcccgtttcagcgcaaatacgattgtttccgccgcttttttcaattcggcggccggaagcgattcagcccagcggacgcaggctttgaggctgttttccgtcatcggcagcttctgctgcataaacgtttcggcaatctgcagagacacagggcccggtttgacggaaagagcgtttaacagtctacccgccgcttcctgaacggttttcgggcttccttcgaattggtcgatgacatgaagccggcccgttttttccgccggctgtttgtcataagaaaaccagtaatacgcctgcggacgaagggcggtttcaagttttccctgcatcgtccggccgccgatctggataagagcgctttgatcgtccagcaaacggagaaccttccctaacagcagcctttgagtaccgctgtctttaccgccgtcctgccggtccggagggatttccgccgtcagctgtctgaaagccgcttggatttcgccgctaatgttcatgtcttaagcctcttttctaacaataagattgaacgggagcgaacgtttttcggtgaatagttgtcggtccgtatgcctgaagagcttcaagatgttctttcgttccgtagcctttatttttttcaaagccgtacatggggtaagttttggcgtactcagccatgagacggtcccgcgttacttttgctatgcaggctccggcggcaattgacacgcttttggcatccccttttataactgatgactgcggaatgtcaagcggaagggtcatggcatcaacaagcagataatcaggtgtttccgttaaagcattgacggcttttaccatcgccagtctcgcggcctcataaatgttgatccggtcaatgacgtccgcatggacaatgccgactcctacagccgccgcttcttccgtgatccggctgtaatactcctcgagcttcttttccgacaatttcttcgagtccgtgagaccgagaatctcgcattctgccggcaaaatgacggcgccggcgacaaccggtccggcaagcggccctcttccggcttcgtcaacacccgcaatcaggcggaagccctttttggatgacagtctttcgtatgccgtcatgtccagccattgctctttaagagctttttccttcgcatgctttttcagccattgctctaaaagcgtctgtacgctttttctcgggtctttctcacattgggcaaggaaggggtcgctttcgtccctgatctcttgcaggcgttcttttacgctttttacggttaatgtattcacgttctcttctcccttacattatgtatatcggtattctgcggaaaaaataaagacccgcatcgctgcgcgtctttattctgatggtgcttcaaatgaaagcctgccgaatttttccgtccggatgtcccgaatgataacttccgttgttttatcatagtcaaccattccgccgcccatcaaacagccgcgtttttcaccgatcgcgtcgaaaagagcggcgatatcctcagggatttcctgaagtccgtagcgctccttcaaacggtcgggataatgctcttccagaaagcgcagcccgaaaacagccacatcctgcaggttgataatcgtatctttaatcgccccggtgatcgccaggcgcaagccgacaagctcatcttcaaatttaggccataaaattcccggtgtatcgagcagctctaattccttgcctacctttacccactgctgtgaagtggtaatgccgggcctgtctcccgtcttggcaatgttttttttggccagccggttaatgagcgtagacttgccgacattcggaatgccgatgattaatgcgcggattgctctcggcctaacaccttttgctttcattttatcgaacttatccttcagcagctctttcgaggacggcacgatttgatgcagtccctgcccgttaacggagtttattgaaagagagggaatgccctgttcctgaaagtggtccttccactgggcagtcacagccgcatccgccttatcggctttatttaaaagcataatgcgcggcttattttttaaaatctcctcaatcatcggatttctcgatgacatcgggattctcgcatccaccaattcgtatacgatatcaattaatttcagtttttctgttacttcccgtctcgctttagccatatggcccgggaaccattgaatggtcatgtgacttcgacacctgccttatttaccggaaccggatgttccgatgatctcttatgtattttacgttgcttgttccgcttttacaaatttcatataaaaaaagagcctgttacgggtaacaagctcttttcgttcgttatcattatcgtctgatttctttaatacgagccgcttttccgcgaagttcacgcaggtagtaaagcttagcgcgacgtactttaccgtaacgtacaacttcgattttcgcgatttttggtgtgtgtacagggaatgtacgttcaacgccaacaccgtaagaaatcttacgaactgtgaacgtttcgctgattccaccaccacgacgcttgatcacaacaccttcgaagatctggatacgctcacggttaccctcaacaacttttacgtgtacacgtaaagtgtcaccaggacggaacgcaggaagatcagtgcgaagctgttcttttgtgatatcttgaattagtttttgcatcgttttcaactccttccaacagatgctcttggccacaactgcaaggcacagcggaacatcgttttcaagcttctgaaggataagcctccttaagccacaagtagtatcttatcatatcttcatcacctgcgcaatagaatctattcgttttcccactcggaaatccattttctttgctcatcagtgagaggatagttttcaagaagatccggacgtcttaaaaaggttcttctgattgattctttattgcgccattcttgtattttggcatggttgccggacaaaagggtctcaggcacttttaagcctttataatcggctggcctcgtatagtgaggatgctctaaaagccccgtgctgaaggaatcctccacgtgggatgcttcttttccgaggacgcccggcaaaagcctgacaacgctgtcggcaatcatcatggcagggagctctcccccggtcagcacaaaatccccgatggagatttcatcagtgacaagatgttcccggatccgttcatcatacccttcataatgcccgcaaataaacatgagatgttcctcttccgccagctcctcggctttcttctgcgtataacgctcaccttgcgggcagacgagaataatgcgcggcttggcgtccgtaccggctgtcagcttttcaaccgcatcaaatacgggctgcggctttaacaccatcccggctcccccgccgtacgggtaatcatcaaccgtttggtgtttattatccgaaaaagcccggaaattgatgacgtcaaaacggacagcctctttttcctgtgctttttgcagaatggatgagccgagcaccccttgaaacatttcgggaaacagtgttaaaaagtcgattttcattcgtctattaacccttccattacatgaatcttaattttcttctcatttatattaatatccttcaccacagaagctatatacggaatgagcgcatcttttttgccttttcttgcaaccacccatacgtcattagccccgggcgtcaagatttccttcactgtgccgatcagttccccgtcttctgacacaacctcgcagccgatgatttcatgaaaataaaattcatcttcttcaagctctcccaagtcttcttcaggaactttgatcaccatgtttcttaggtgttcgacttcattgagactcggcatttctttgaattgcagcaggtgaaactgcttgtgaagcctgtgggcgctgaccgttactttgattggctccgcagccccttccgcaaacaaatagagcgtattgccgggcttgtaccgttcttcggcaaagtccgttttagaaatgacccgcacttcgcctttaatgccgtgggtatttacaattttgcctacattaaaccatctgtttgtcatattatcacctcgggcggatttcaattactaccccgtcttttatgacgatggtatttgccgctgttttttcatgccagttatcaccgacgttgattgaaagcagcgcatcgatctccttttccttcacttcgcttccaagcgggagcgactctgtctggcttatttggaaatcaatcattttgattttatcttgtcttttttcaatggcttttttaaaagattccgctacatcgggattctgctgatctttttcatgttttctaagctgaaaatagagctggctgcattctcgttcaagcgtttgctttttttctgcaaaagaggccaaaagcttttccttgctttgctcggtcagaacctgcataacggttaccctgtgaataatctgcataggaccagactccccactcttccaacatatttctgttcatttgccttttttacgtgtaaaaaaaggggaggtgccggccctctccctttttcagtcaaatatttcaaattgaactttcttagaagactgtgcgccagctgcaaaaacgacggttcgaatcgctcttgcagtccggccttgctttccgataatcttaccggtatccgacttattgacagataagcgtagcgcaatcttttgatcagtctcttcctttgtgaccgttatgtcttccggatggtcgacaagcggagccacaatgctgacaatcaaatcttccaagttctgatcagtcattacttgccttgtttagcgttgtggaatttttccataattccttggcttgagaacaagttgcggactgtatcagaaggtttagctcctgtttgaagccatttaagagcaagctcttcattgattttcacttcagccggctttgcaaccgggttgtatgtgccgactgtttcgatgaaacggccgtcacgcggtgaacgagaatctgctacaacaatacgatagaaaggagatttttttgctcccatacgttttaaacgaatttttactgccattttactagcacctccgaaaatatttcaacaagatagtatattaacaatgataaaagtgtttgtaaagtgttttttcttaacaacggttttatcatgtataaccgattacataaaaggtaatttaaagccttttttcttcccttttgacatgttggtcatctgcttcatcatttttttcatttcctcaaactgctttaaaagacggttgacttcctgaacggatgttccgcttcctttggcaatccgcttccgccggctggcgttaataatatccggctgttctttttcaagaacagtcattgatttaatgatcgcttccacatgattcagctgtttttcatcgacttggatgttttttaagcctttcattttgcctgctccgggcatcatttgcagcagttcgtcaagaggccccatgtttcggacctggccgagctgctccagaaaatcatccaatgtgaagctcatcgttctcattttctgctcaagctctttggctttgtcttcatcaacggtcgcctgagctttttcaatcagcgtcagcacgtcacccattccgagaatccgggatgccatccgttcaggatggaacgcttcaagagcatcgagcttttctcccattccggcgaatttaatcggcgtttcggtgaccgcgcggatagaaagcgccgcacctccgcgggtatccccgtcaagctttgttaaaatgacgcccgttaaaccgagctggtcattaaagcttttggcgacgtttaccgcatcctgaccggtcattgagtcgacgacaaggaaaatttcctcaggatttgcgacttcctttacgccggagagctcatccatcagttcatgatcgatgtgcagccgtccggcggtatctaaaatcacataatcatgatgctcttccttcgctttttcaatcgcctgtctggcaatttccaccgggctgacctgatcgccaagcgaaaagaccggcatatcaagctgtttccccagtgtttccagctgtttaatcgcggcggggcggtaaatatccgcagccacgagcagcggtttgcggttatgttttttgcgcagcaggttggcaagcttccccgtggttgtcgttttaccggcaccttggagcccgaccatcataataacggtcggcgggcgtttggcggcggcaattttgctttcttcgccgcccatcagctcggtaagctcttcttttacgactttaataacctgctgaccgggtgtcagactctgcatgacgtcctgcccgacagcccgttcacttacttttttcacaaaatcctttacgactttaaagttaacgtcagcctcaagaagcgcaagacggacttcacgcatcatctcttttacgtcttgttcgctgacttttccttttccgcggatttttgaaatcgtcttttgcagtcggtcggctaatccttcaaatgccattgtttgccgcctcctaatctaatttctcaagcgcttcaatcagagccgtcattttttcctcttcctgcaagccggaagcaagctctttcagctttgtaaacatttctttacgctcctgaaactttttaaaaaggagcagtttttcttcatattgttcaagcatcgcttcagtccgtttgatgttatcgtaaacggcttgccttgaaacgtcatactcttcggctatttcaccaagggagaaatcgtccagataataaagcgacatatagctcttttgttttgacgtcagcaacgactgatagaagtcaaacaaatagttcattctcgtcgttttttcgagcgacatttgagctctcccctttgttaagtcaaatccctttacaaaaacttagtttacatggtttcagagcgtgtgtcaagtttttatcttgtcaaagcaggatgctctttttacataataagtgttttcaaaaaaattcatacagaccgtcgttaaaatactcgaattcttgttttgatacacgatagcggcaatagccttcgtaaaaagcattgagacatgattcatttgtgacaaaacgactgatcgctaatgattcatcataacgcggatctcccgccgatattcccgcagcatcgataaacagatagacctctccgtctctcaccagcacattatcagtcgtgcagtcaccgtgaatcattgtctgctgaacaggaacaggcctgtacctgtccaattccttcaaaagctctgcacttccttcagcttgtccttttttgacatattccccggctcgtttgatttgcagatcgagccagtctgtttccggctgtaaaccagagaccatttcggtttcatgcagccgctgcagaaactggccgaaacttttgatcagctttttcttttcagtatcccctttggcttttcttaaagccgaagtcagggtgattccatcctcaaatgacatgatgatatggctggcatgctgttcctgtatcatcccatagtaaataggaacaggcagacgacgagtttccgtcagttgttgtaaaacgaaggcttctctcattaaccattcccgatacttctgttgaaaagaacttttcagcaaaaatgcgtcttgaccggtcactatttttcgaacggttgaagtgcctccctgttcatccagcagcgacatatggtttatcgcgccgatcttactttccaattcagctttcagccatttgtccaacaactgccccctccattccgatctatcaatgcgtataaaaaaacgagtataaaaccgtccattttatactcgttttttattcattaatcttcggctttttcaactaaatccgaaaagagaccgtatacgtaagattctgcatcaaaccgctggagatcgtcaaccttttctccgaggccgaccagtttcacagggatgtgaagctcattgcggatcgccaggacgataccgccttttgcggtgccgtcaagcttcgttaatgcgatacccgtcacattcgtcgctttggagaattctttcgcctgcgccatcgcattctggcctgtcgtcgcgtccagcgcaaggagaacctcatgcggggcctcaggcacttcgcgttcaatgacgcgtttgaccttttcaagctctttcattaagttaactttattctgaaggcggccggccgtatcacaaatcagcacatccgctcctcttgctttagccgcgtgtacggcatcataaataaccgccgcagggtcgcttccggcagcctgcttaatgacaggcacgcctgtacgctccccccacacttcaagctgttcaatcgccccggctctgaaagtgtctccggcagcgagcacaacggatttgccttcattcttcagcttatgggcaagttttccgatcgttgtcgtttttccgacgccgtttaccccgacaagcagaataacgttcaggcgcccgtcctgaatatttaattcagaaatctgttcgtcgccgctgttataaatgtcgacaagcttttcagaaatgacggactgcacttcctgaggatcctgaatgtttttcagcttcacttcttttttgagctcatcaatcagctccatgacggttgtaaaacctacgtcagcgccaatcagcacttcctcaagctcctcgaagaaatcctcgtcgactttccggtagcgggagacgagttcgttcactttatttgagaaggaatttcttgttttttcaagaccatctttaaatttttcagagacggagtctgtctgtttcgtgattttctcttttaattttttaaaaaagctcatctttcaacctctttcctcgttactgaataaattcttttgtttcttccagtttgaccgaaaccattcgggaaacgccggattcctgcatcgtaacaccgtagaggacatccgcttcttccatggtgccttttctgtgggtgatgacgataaactggctgtcgccgctgtatttttttaaatattgcgcaaacctgaatacattggcttcatcaagcgcagcttccacttcatcaaggacgcagaacggcacgggccttactttcagaatagagaataaaagggcaatggcagtcagcgcccgttctccccctgacaaaagatttaagttttgcagttttttgcccggaggctgcgcgataatgtccaccccggaattaagaagatcattcggatcagtcagcttcagttcagcccgtcctcctccgaataaagaacggaacacgtcgttgaattgagaacggatctggataaacgtttcatggaatcgcttcgtcatttcagaatccatttcttcaatgacttgaaacagtgtgtttttcgcttccgtcaggtcatttttctgctctgttaaaaactgataccgttcgtttactctttcaaactcatcgatgctgccgagattgaccgttccgagctcttcaattgaaagcttgatcagtttgacccgttttctcgcctcttcaggctcgagttcaagctgatattgttcttttgccccttcaaaggataagctgtactcctcgcgtaaatactgcaagagattatcaagctcaacttccatccggccgagttttacctcttcatctttcagaatgtccgttttttgcttgtacagacgcttcatctctttcagctcaagctcgttcgtatcaagagcccgctggagcttcacacgctggtcgcgccggctggcgatcaattcgatcgttctcgttttatcgtgaagcttatgatgggctgcttcttcaagctgctcctcaccgcttgtgctggacgtcatctctgaggtcaggaggcttaaatcttcccgtgtttctttcagagcgagctgcgtttcttcaagctcttttttcagccttttgaggttgtcttcctcactcgagcacgcctgttcttttttcgcagcggccactttacattccgtcagttcatgagagagcgtttcttttgttgaggatagggtctgcttttgttttgtcagcctttccatctcttcctcaagctctttcagctggccggatgcctcactcagctgttcttccagagctgatttgcgcgtctctttttcccggctgctttccgtcagtgatgctttctcctggtcgtaaagctccagatgggtattgatgttcttttcagcaacttcgagttcatacagcctgccttttacatcctgctgctttgttctgaaagcctcaccgtcttcacggagaccgctcagcgtatgttcaagctcttgaatggcctgcttcagcgctttgacctctttttcgagcagagctgttttttcttccatttcggcaagccgcgcagtcaccgtctcaagctcgcggcttctgccgagcagagaattgtttttctttttgaccgcgccgcctgtcattgatccgcctggattgacgacatcgccctcaagcgtgacgatgcggtagcggtgcccgagaagcttggccagttcattcgcgccttttaaatcttcagtgatcagcacggtgccgagaaggttttgaatgacattccgatacgccgcatcatatgtgacaagcccgctcgctgtgccgaggaaagacggatgctttgaagccgtctgttcatcacgggtttgaagctggcgcggtttcataactgtaagcggcaggaacgtcgcgcggccgaaggaattctgttttaaatattgaatcgctttccgcgccgcctgctcatcgtctgtgacaacgtgctgcgccgctgcgccgagtgcaatctcaatcgccgtttcatatttttgttcggtcgcaatcagttcgagaacggcgccgcggatgccgccgagctgctctttctgcttcagcacttcttttacgccttggtaaaatcctgaaaaatcgccttgcatcgtttcaagcatatcttttttggatctggcctgctggacgaattgatatgcctgatacagcgctgattctttcttttcatactggcgttttttctgttcatatgctgtctggacttcgcgaaagcggacgacctgattgtgaatatcctcttcaacggcggccaattcctcttcgcacgccgctttgcggactgcaatatcgttacgttcttcaaggtatttttcattgtttgcggtcagtctcgcctgctggaccgcagattgggacatctgatcatctaaaagctgcagctcgttgcgaatcgacgcctggctgtttaacaattcaaagtaatcgctttttaattgttcgattttctcttctacattttcattatgcagactgagagcctgctgcttttctttcacctgggcgtttaaccgcttcacttccgcacgaagtttatcatagacggcagactgtttttcaatgtccgctttcagttcggcttctttgttcgtgtaatgtgtaacggattcctctagctgttcccggttttgcgcggcgttttttttgcgctctttcagcacttctttccggccttccagcttttccagctcttcacttgtcacgagcagcacctgctgcagttcgttgacggattcatcaagcgcgtggattttatctctcgtctcttctatcatcgcttcttttgcggacagagctgatgattccgccaattcttcttgttttgccgtctgcaccttttcttttaaacccgaccatctgctatgcagttgttcgatgtcaaaggcggtaagggcgatttcgacatgctcaagctctttctttttttctaagtagtctttggcgattgatgcctggattttcagcggttcgacctgatcttcaagctcgtggagaatatcttccaccctgtttaagttatcctgcgtctcaaacagtttgttttccgcttttttctttcgtgttttatatttcagcacgccggccgcttcttcaaaaatactgcggcggtcttccgctttgctgctgagaatctcttcgactttcccctggctgataatggagaacgcttcttttccgagcccggagtccataaataagtcaatgatgtctttcaggcggcactgctgattgttgatgagaaattcactttctccggaacggtacacccgcctcgtcacgctgacttcgtgataatcgatcgggagaaaatgatcttcattatcaagcgttaacgtgacttcggcaaggttcagccgcttgcgcgaatcacttcccgcaaaaatgatatcttccatttttccgccccgaagcgagcgggctgattgttcgccgagcacccagcggatggcttcggtaatgttgctctttccgctgccgttcggaccgacaacggccgtgacgccttttacaaagtcaacggatatccgttctgcaaatgatttaaatcctataacgtctaaacgtttgaggaacatcccagatcctccttatcgtataagtatctcaatattatcataatcacccgcttatatcaggcgcagacatactgaaatccccctagggatacagggggattttattgtttcgtatgatgtttttgcaattttgcaagagcttcctgtgccgcatgctgctcggcttcttttttggaacgtccgttcccgataccgagcgcctcacctttaagagagacgagcgcctcgaattcccggttgtgggcaggccctttttcattgagaattttgtactcaagcgatccttttccgtcccgctgtacaaattcttgaagctggcttttgaaatccatcacatgagaaaaagcaccatcgtttattttagggaacacgtactctttcaggaattgctgaaccggctcaaggccctgatccagatacagtgcgccgataaacgcttcaaacacatccgctaaaagcgcaggacgctttctgccgcccgtcatttcttctccttttcccaagagaacaagatcgccgaatgacaattcgtgggcaagtgagacgagtgacggctcgcatacgatagcggctctcagcttcgtcaaatctccttcactcatggccggatatttggcaaataagaattgggagatcgtcagttccaaaacagcgtcacctaaaaattcaagcctttcgttgtcttcatacggctttttccgatgctcattcacataagatgaatgtgtaaatgcttgatacaaaagtttctcgttttgaaaatgaaccgaaatccgttcttggaactctttaaattgctctatttttttatagaacttttttttatctttaaaatgtgagtgttttgacatagtaacctccataggcacatcaggttcaccgcgctccccgccgtaaacggaatcagcagcgcgtacagcgtcagacgccggtaaccgaacgattaaagggctaaagccccgctgtcaggcgggacttttagcatcagcttattgctggttttgtatgtagttcacagcgtcgccgactgttgcaatcttttcagcatcttcgtcagaaatctccatatcaaactcgtcttcaagttccataacaagctcaactacatctagggaatcagcacctaagtcttccttgaaagaagcttcaagtttgacgtcagcttcatcaacgccaaggcggtctacgatgattttcgttacacgctctaatgtatctgccatagcaattcacctcccctcaagtattatagaggattcgtttttaaaaaactagagaaactaggatgaaattttaaaaacaaatctttacatcaccattccgccgtcaatatgaagggtttggcccgtcatataacgcgatccttcagaagcaaggaacgtaacaacgctgctgatatcggaaggatcaccgaaacgcgcgagcggaatctgcttcagcatttcatcttggacttctttagaaagcttgtccgtcatatccgtggaaataaagcccggagcaatggcattgaccgtaatatttcggctcgcaagctctttggctgatgacttcgttaagccgattacaccggcttttgccgccacatagtttgcctggccggggtttccgctgacgccgacgattgatgatacgttgataatccggccggagcgctgtttcatcatctgtcttgtaacggctttcgtgcagttgaatacaccttttaagttaatgttaatgacatcatcccattcattttctttcattctcatcagaagattgtcttttgtgatccccgcattgttcacgagaatgtcgattgaagaaaatgcagcgacagcctctttcatcatgttttgtacttcttcggaatttgatacatcggcttttacggcgatcgcgtttcggcccaaagatttgatctcatctacgacttcgttcgctttcgcttcattcccggagtagttgactactacattacagccgtttttcgcaagatcaagcgcgatcgcccgaccgattccgcgggacgctcccgttaccactgctgttttttcattaagcatcctgattctcctccttcagcgtttgaatcgccagttcgatggtttcatggtcagaaaccgagattgttttaaggcggcggttcacttttttcacaaggcctgaaagcacttttccgggcccgatttcaacaaacgtcgtgacgccttcgtcaatcagtttgttaatggtttcttcaaagcgaacaggcgaatacagctgttcgatcagttttttcttgatatcgtctttttccgtcataacgtcagccgaaacgtttgaaatcacgggaacagccgcattttttaactcacaggcgctgagcacctcctcgagtttttgcgctgccggcttcattaattcagaatggaacggtccgcttacttctaatgggatcgcccgttttgctccgttgtttttcgcttcctctgaagccagctccacgccttttgccgttccggaaatgacgatctggccggggcagttcagatttgcaagctgtacgagatgaccgttttccgtcacttgatccgtcacctttttcaaggactccgcatccattccgagaatcgctgccatggcgccttctccggccggcacggcttcattcatgaattctccccgttttcttaccgtgtaaacggcatctttaaatgtcatcgctcccgccgcaacaagcgccgaatattctccgaggctgtggccggcggtgaaatcaggggtgatgccggattctttaaacttttccaatacggcgatgctcgttgtcaacagcgcaggctgcgcattgtatgtaagggtcaattcttcggcgtcaccttcaaaaatgagcgagctcagctttgtttcaagcgtttcatccgcttcatcaaaaatacgttttgacgcttcttcgcgttcgtacaggtcttttcccatgccgatatattgtgatccctgtccgggaaataaaaatgcaatcttactcatgatgcggtaacctccagactactcatctgttttttcttcttttacttcttcttctataaatgcggccacgttttggctgaccatttctctcgcctggcgcagcgcatggtaaacagcgcgtgcgtcagaagagccgtgcgctttaatgacgggcgctttcaaaccgaaaagactcgccccgccgtactcagaatagtccattttcagtttcatttccatcagcttcggctttagcacgcccgctgcaagcttagaaacaaaacttgaagtcagtgtatctttcagcattttgaaaatcgataacgctgaaccttccaatgttttcaacgtgacgttgcccgtaaagccgtctgtgacgatgacgtcagcagcgccttcgagcaagtctctcgcctcaacgtttccgacaaaattcacgtttgtttcttttaataattcaaacgtcttttttgtcaggtcgtttcctttcttttcttccgtgccgacatttaacaatccgacgcggggcgagctgattccgagaacctgccgggcataaacagatcccataattccgtactggacgagatgctccggtttggcatcgacattggctcccacgtccaaaagaaggaaaccgtcgcctgaaacggtcggaagcgtcggcgcaagcgcaggccggtcgattcctttaattctgccgacgataaacagtcccgctgtcatgagtgcgcccgtattccccgctgagatgcaggcgtccgctctgttttcagccacttcctgcgccatcagcaccatagaagagtttttctttctgcgtacggcgcggaccggttcatccgtcggttcaatcacttcatcggcgtgcaacacagtgatgcggtctgatgttgttggcaagtgtgattctatcgttgtcttgtcaccgaccagcgtaatatgaagatcgtcaaatgcctcaatactcttcattactccgtcaataacagctttgggtgcgttgtcgcctcccattgcatctacagctattctcatgcatgctccacctttatgattgttttgaacggtacatgtcaaagctgccggagaacacgacttcttctcccacatagctgttgacttcaactaccgttctgcctttttctttttcgactgccgtcactttggctttcgcaacgacgcgctcgccttctttcacctgtcttgtaaagcggatatttgcgcttgcggtcagcgccagctcatcatcaatgacggctacggcgagtgagttcgcctgcgcaaacaaatgatgcccccgcgcaatttgattgcggctgaagacatgttcgcgtcttacttctaatatggaaatggcctggccgtcaagctccagatcaatgatttcaccgatcacttcgtctaaagacaatgatttcacttcatcatcaagcgtttgttctgccacgtttttaattctttccctcagctccggtattgagagctctaagcggtctaaacggatcgtctgaatgctgacgccgaatttccccgctaattcttcatctgtgatgaagggtgtcgatttgatcgtctgctgcaataatttttggcgttctttcttgcttcttctcatctgtaaacaccatccggacaattaagactaggtactaatagtagtatataatctcatagattggaatgcaatgattgttttttgaaagccgccgaattttacagaatcagcttaatttctccccttctaggacgccgcttgaaagtaattgaccgcgcagcatgcggtattcgtcatctttccaaaaagcctctgaagacaccagattggccgcatcctggcgggccgtttccaaagctctgtagtcatgaaccatatccgccaccttgaactcgggcataccgctctgtttttttccgaagaaatcaccggggccgcgcagttcaaggtccttttcagacagctcgaagccgtcgtttgtctctgacatgattctcatccgttccttcccggtttcggatttcggatcggccatcaagatgcagaaagattggtggtctccccgcccgacccggccgcggagctgatggagctgagataatccgaaacggtcggcgtcatagatgaccataatcgtcgcattcggcacgttcaccccgacttctacgacggttgttgacacaagtacctgacattgattggcgctgaattctctcatcacttgatctttttcatcagaatggagcttcccgtgcatcaggccgacattccatttaccgcggtaaacgtcagacagcatgttatatacgtcaatcgcattctgtacatccagtttatccgactcttcaatgagcgggcagataatataggcttgccttccctgcttcagctctttttctataaaagccaaaatccgctccagcatgtcgtgtttcacccaatacgtttcgatttgttttcgccccgcgggcatttcatctatcacggaaacatccatttctccgaagacggtaatggccaacgttctcggtatcggggtggctgtcataaacagcacatccggatcttgacctttattcttgagttttttgcgctgttcgaccccgaaccggtgctgctcgtccgtaataacaagactcagcgctttgaattccacttcatcctggattaaagcatgggtccctactaaaatatcaatctctccgagagcaagccgctccaaaagctccctgcgccgctttccttttacagaactcgtcaaaagcgcgatatttacatcttcatttgcaaacaacgatacgagagaatctgcatgctgttcggccagaatttcagtcggcaccattaatgccccctgatgccccgacagaatcgcagcgtacaaagcgatggcggcgacggccgttttccctgaaccgacatcaccttgcagcagacggttcattcggtaaggggatgtcatatcagcggtaatttcccgaagcacgcgcgtctgtgcggtcgtgagcgaaaacggcaggctgtctgtgaaagcggtgagcttttcagcaggaaacacatggctgatgccttttgactgttccctttccgctttacggaacgcctgcattttcagctgaaataataagaattcctcataaacaaaccgtcgtcttgcctgctgtaacgattccctcgtttcaggctgatgcatcgtctgcagggcatgtttgtaatcaggcagcttatagcggattctcaatttttcaggaagcggatcggccgcactgtccaaatgatgctgcagcgcttccttaataaaccgtctcatcatttttacggtgacgttttctttaacggaataaacaggctcaatgcttttatcttcttgatgaggaccgttttttaattcctgcacggaaacggtctgtctgtgtttatcccatttcccggatatcgtgacgacagaacctaacgtcagtttcttttttaagtagggacggttaaagcagaccgcggtaattaaataattgccgacaagcaccctgaatgtcagcctgtttcgttttttgccgtaataggtaagagaaggttctgaatgaaccttcccttctaccgtcactctttcttcatgttttacttcttctaaatccctcagctcatagtcgtcataacggtaagggaaataattcagaagatcagaaatgtcatagataccaagttcgtgcaatgttttttctgtttccggcccaatgcccttaatttccgctatactagtttgctgatggtgtgtcacttgatttcagcgctcctccgaaaatttttttctctaattctcttcccgtcggtgtcgcagctaaaccgccttgtcccgtttcacgcagtgctgtcggcattgtctggccgattttgtacatcgcgtcaatcacctcatcgcaaggaatgcggcttgtaatcccggccagcgccatatccgccgcgatcatcgcgttggatgctcccattgcgtttcgtttgacacacggcacttctaccaatccggcgaccgggtcacatacgagaccgagcatatttttcagtgtaatcgccattgcttccgctgattgctgaggcgttccgcccgccatttccacaatcgcggccgctgccatgcctgatgctgacccgacttccgcctgacagcctcctgccgctcctgaaatactcgcattatttgctacgacaaaaccgaacgcgccggctgtaaacagaaaacggatcatttgttctgtcgtagggttcagcttatgctttacggcgaataacgttcccggcacaaccccggcagagccggcggtcggtgtagcgcagatcgttcccatcgccgcattgacttcatttgtcgccacagctttagaaacggcgtctaaaatcagattgcccgaaaggcttcttcccgattggatgtatgcctgaagtttcacggcatctccgcctgttaaaccggtctgactcgtgacgcccttcagccctttttcaacagctgcttccatgacggagagattgcgctccattccttgaaagatttcttctcgtgttttttgcgtcacttccatctcttgggtgatcatcacttccgaaatcggaatttgtttttcttgagtgatttctattaattcttttacattacgaaacatgtcattttcctcctgactttttagtcagctatcttagtaacctgtataatattaggaagtgttgaaagctcgtcaagcacttcttcttcaatattctgatcgacctcaatcgtcatcagcgcaagctggccgacgtccttacgcgccacttccatatgtccgacgttgatggagaatttcgcaagcacattggcaacgcctgcaatcgtgccgaatttatcattgtgaacgactaaaatagccgggtggtttccggaaagtcgcagctcaaagccgttaagctccgtgatttctatttttccgccgccgatggaaataccggtaagggcaagctctccctcatcatcagaaatgacgatacgcgccgtattcggatgaacgggcacggcatcctctgtacggaactctacatatatgcccttctcttccgcaatttgaatcgctgttttaatccgttcatcaaatgtatcaaaatcaagcaggccgccgataatcgcgacatcagtgccgtgacccttatacgtttctgcaaatgatccgtaaaaagacacaacgatccggcggggctcacgcctgaataagcttctggccactctgccgatccgggcggcgcctgcggtatgtgaactggacggaccgatcatgaccgggccgataatatcaaaaacgcttctatacttcatgctggtttgctcctccttaacatcacttcattcagcgcttttctttagactaattgaacatttctcaattggcaagcaggcacactgccgcactgccgcaggtaaataaaggcataagaatagaagggcctgataagcccttctattctgccgcaaatatatatggatacagaggctgtctgccgttatggatttcaacctcgatatcttcacagacgctagcaatatactcagcgagtttctcagcttcttcttccggcgcgtcctctccgtacaggatggtgacgatttcatcttcttccccgatcatttcatccagcagcaatttcgccgcacttatccgatcttcggcgctgccgataattgaactgtttaaaatgccgataaaatcaccttttttaatttctttgccgtcaatatgggtgtctctgactgaatatgtcacctgtccgcttttcacattccggatggcctcaagcatattggcttcatttacatcagccggctggtcagggttaaacgcaagcagggcggtcatgccttgagggaccgtttttgccggaatgacaatgacattttcttcagctacgctcgccgcctgattggcagccatcacaatattggaattgttcggaagaatgaaaaccgtctccgcattgacagactgaacggcttcaacaatatcttccgtgctcggattcattgtctggccgccttcgattacgtgtgaagcgccgatgctcgtaaacaattcagaaatgccctctcccattgccacagtcacgatgccaaaaggcttgcgggcttctttcataacgccggccggctttttttcatcatgttcttggctgatgattgaagtatgctgttccctcatgttttcaattttaattttaatcagatcgccgtaacgctgtgcgagattgagtacgttcccaggttcttcggcatgaatatgaactttcgccagcgtatcatcagccacgaccagcaatgaatcgccgaaacggctcagttcgtttctgaacgcctcttccttgaacgtccgtttatcttgatccagcctcaccattacttccgtacaaaatccgaattcaatgtcttctgtactcagcatgctctgcgcgcttttatgatgctcggcattcaccatatcatcgagtgccggaagaaccgcttttttcggtacggcctctccttttaaagcagccaaaaagccttcatatacacaaagcagaccttttccgccgctgtcaacgacaccgacgtcctttaaaacaggaagcagatccggcgtgcggttgagcgacgcttccgcttcttcaataacggcctccatgactgaaataatatcggtttcttctttggccgaggcgaccgcttttttagccgcatccttggccacggttaaaatcgttccttcaaccggtttcataaccgccttatatgccatatccactcccgcttggagtgctgcggcaaactcttgggcatcaatttggtttttgttttcaatgctctttgtgaaacctctgaacaattgggacaagatcacccctgagtttcctctcgctcccataagcaggccttttgacagggcgatgccgactttgccgatgtcgggtgagtcaatgtgctctacctctcttgcaccggatgacatcgataaattcatatttgttccggtatcgccgtcaggcacgggaaacacgttcagcgcatccaccgcggatgcgttttgagacaatgtctcagcccccgccagaatcattgccgcaaaagctctcccatctaagtttcgtctagacaatactcatcctcctcactacgggttcgttactcgtacgccttggacataaatatttacagaatcaactgcaagtccgattgtttgatttactgtgtattttaccttcgtctgaacattgtgggctacttcggatattttagtgccgtagctgacaataatgtacatgtcgatatgtatttgttcggcttcctgacggacatgtacgccttttgcgaagttctctctccggaggatttcagacaaaccgtctttaatctggttttttgaggccatccccactattccgtaacagtcaatggcagcgcctccggcaaccattgcgatgacttcgttggatatatcaatctgtccgtattttgtcttcatttcaatggacacacaggttcctccttcaggtgcatagagttatcattattctactatatgtatcccattatgaaaagaaaagatacagacagcggccttcagcgcggaaatgtgattggttttacatgtcaagtgatttttcttgaaagtaagggaaacaatagttgcaaacggtttttagctgtggtaaattatttaaagtattgtataacgaaagcatctgagacactatgtttaaaaagatgtttcgcgcagttaggagggaaacaaatggcacgtaaatgttttattacaggtaaaaaaacaaaagccggaaacaaccgttctcacgcaatgaacgcttctaagcgtacttggggcgccaaccttcaaaaggtccgcatcctcgttgacggcaaacctaaaaaagtgtatgtatctgcccgggctttaaaatccggtaaagttgagcgtgtataagcaaaaatgaacgcctgcccttttatgcggcaggcgttttttatgcgttcaaagagggcgatttcagcttcttgggcttactcttttctaaatgagcccagcatcgcccggacaattcctcctaaaaacttcggcaatttaatggtataaaatttcattttgtcccctcctataagtcccgtatccgctgcgttcatcactttaggattcatggttttttccgcatatggcagaagccgcttttctaatccgcgctccttaccattattaatatgccttttgcaaacgaaaaagtacctcgtgaatgaatgagttcgttactaatacatagtgtggaacccagaggaatatgacaattatcaaggggatatttaaaaccgtcgagtgtcaggccgtctgccgcttccgtaaacggaatgaaagaaatatagcgtctgcgcgctttttcttcaattgtataacggccgggcccgaacatctgaatgtcattctgccggtcgatcagcttgacatcggtatgcttatgtaaggctttatacagcagctggatgttccctaaaaagtgatcggctcttccgcccgtcacaccgaatacccgaatgttttccggttctttttgtaaagcccagtcaagggcgagttcaagatcggtataatctttttccgcctgatacacatggagggccggcgccgctttttgaatctgcatgagctcctcttccgtaatgctgtcaaaatcaccgaaagcttcctgcggaatgattccggcctccaaaagagcaaccgtccctttatcaactccgacccacgtcgtatctccgtctgtgtattcggatagatcgggaataagctcccgcgggccgcccgcaacgatattgattgtcttcatatgctatcctctctcttagacgcgaaaagagccggcggctttcaccgggctctttttcagcatgtttatgatgcgtttcggatgtcagcgatggcttttttccgatccggctgattatatacggcagacccggcaacaagcagattggcgcccgcttcagcgcataaaggggctgtttctttattaacgcctccgtccacctcgattaaaagctcagacaggcctttctcctcagccagctgtttgacctgacggattttcggcagaaccgaatgaatgaagcgctgtccgccaaaaccggggttaaccgtcattaacagcacaaggtcaagctcctcgatcacatgttcaatcatttggacgggcgtatgcggattaagcacaactcccgcttttaccccctgctcttttatcaattgaatggtccggtgaagatgcggacacgcttcagcgtgaacggaaaggatgtccgcaccggcttttgcgaatgccgggatgtagcggtccgggttttcaatcataagatggacatccagcggcagatcagtcaccggacggacggcttcaacgataagcggcccgattgtaatgttagggacgaaatggccatccatgacatcaatatggatatagtccgcccctcctttttccacgtctttaatttcctcgcccagtgaagcaaaatcggcggaaagaattgatggcgcaaccttaatcatattaatacctcggctttctctcttttatttcctgcataaattctttgtaatgctcgtagcggtacggctgaatctctccttcttccaccgcttgctttaccgcgcatttcggctccttaagatgcagacagcctctgaatttgcaggaggcgcttatttctctgatctcagggaacgtgctgcccagctcttcttcctcaatgccggtaaattcaagcgaactgaaccccggagtatccgcaaccagaccgcctgatgtatgaatgagctccacatggcgcgtcgtatgttttccgcgtcccaaatgcgcggaaatctcgtttgttttcagctcaagctccgggctgatcgcatttaaaagcgaagattttccgactccggactgaccggcaaacaccgtcgttttgtcctcgaagtgtttcacaatgcctgttaagccgctgttttcttttgatgacgtcacatatacgtcataaccgatcgcctgatagtctttcacgtaagaaagtatcgcctctttcgattccccgtctgcagctaagtccattttggttatgcagatgatcgggtgaatgccgttggcttccacaaggacgagaaaacggtccaataaagacgtgctgaacgccggctgaacggcagaaaagacgagaacggcctgatcgacatttgaaatcggcggcctgatgagctcatttgttcgttctttgatttccagcaggtagccttctttatcattttcagcctgataaacggcataatcgccgaccaggggcgttattttattttttctgaaaatgccccggcctctgcattgaatgatcttgtcctgtgattcatccaagacataatagaatccgcttaacgcttttataattttgccctcaggcatagggtccctccttatcagtcattatctttcgggtattcaatcgttttgtagctgacgactttatgatcgaccatcacttgataataccccttctgtccctgatcaatcttcagttcaattgttttttcggtcggctcttttattttaaatgagtcatacgtatcagagatgctgtggtccttatcatcgatggcgatttgcacttcaagctcttccccttcatgttcgggttcgtaaggaatgctgattttttcttttaccgttttcgccggtttttcttcaggtccgagcgagaacgtcacttcaacattacttcccggcttaaccgcagtgccggctgacggctcttgtttcatgacttgtccttccggcacgtcatctgaatgggcttgtttttcaacaagctgcaggccgttatcttcaagataccctgaagccgcttctttgctgtaagtctttaagtccctcagcgtaacgtccgccgggccgaggctgaccgttagattgacttcatcatcgcttgcgaccatatcggtgccggctgacgggtcctgatcaattacggtgccggcctcgctgtcatcgttttcttctttgacattgacatgtttgaaacctttttccttcagcgctttttttgcgtcgccgatctgccgtcctttcacgtcgatcagctgggttttcggttttccgatgcttttgtacagttttacagaagagccttctttaacggtagaccccgcttttgggtccgttttgaccattaattcctcttctattttttcatcttcaatatccgttatatcaggatcagcccggagcccgttcttttcaagcagggcttccgctttttcgtacttcatgccccgtacgtcggggacgcttacatctttaggcataaataaagacgggaacacggtgaccgcaagaacagccgccataataaaaatgaaacagacggccagcaaaacccacggccatttccgttttttctttttggctggctgctgttccttatcatccgtctcccccggcgtttccgcctgagacgcggcttttgggccgtcagtaataacgggaatggcttttgtcatttcctcatcatcctgcacggaaaatttttgttcattcagcctgccggcgtcaaaagccgttctgatgtccgcctccatgtcctcggcgctttcatagcggtgaaacgggtctttggcggttgcctttaaaataatgttttcaacgctctgcggaatggaagggttccactttctggcggaaggcgtttctgtttgcaggtgctttagcgctatgctgacggctgattctccgtcaaaagggattttgcctgttaaaagctcaaacagcacgatgccgagcgcgtaaatatctgattttttcgttgccagaccgcctctcgcctgctccggagacaaataatgaaccgagcccagcacagaattcgtatgtgtgattgtcgtagacgtaagcgctgtggcgatgccgaaatccgtcaccttgatatgccctaaatgatctatcaatatattgtgcggtttaatatcccggtgcacgatatggttttgatgggcatgggcgatggccgagacgatctgctccataacggacagcgcttctttcggatgaagcggtccgtgtgcgtttatgtattcctttaatgtcatgccttccacatattccatgacaatgtaataaatatcgccttcctccccgatatcgtaaatactgacgatattcggatgatcgaggcttgatgccgactgtgcttctcttctgaaacgcctgataaaatcaatgtcattcacaaagtcaaaccgcagaattttaattgcgacttcacgttcgagaatgatgtcctcagctaaaaaaacgtttgccattccgccgccgccaatgggccggaggatatgataacgcccgctgatccgcttgccggttagcacttgtcttcaccctcttttgcatctgcggaaaactcaatcaacacagccgtgatgttatcttcgccgccgttttgatttgctttgctgatgagaaggtctactttttcctgatgatcagattcggcttgaagcatttgtttgatctcgtgatcttctattttatttgacagtccgtcagagcataaaagcagctgatcgccgtcagacagttcaaaagaacgggcgtcggggctgatggtttcatctgtccccagcgctctcgtcaatacatttttccgcggatggtgctcggcgtcctctttcgaaatctcccccgtcttgaccagctcattcacaagcgaatggtcctcagtcagctgagtgaattccccctcttgaagcaggtagcaccggctgtcaccaatatgagccacagtgacaaacttccccgtgaataaggcgcagacaatggtggtgcccattccccggcattcttcattggctttagcgtggtcatgcactttgacattcgcctcatgaatccggtctttcagccaatcctcgcaagcggacggcagagaaggaaccgtttcggtccggttccactgctcttccatcgccgcaaccgccatcctgctcgctacatctccggcaagatgaccgcccatgccgtcggcgacaaccgcaagcaccgcgtcttcttttgtgaaaatgcccgccgcatcttcattatgccggcggactttacctgtatctgttttcaaggctgtaatcaacctcttcacctcgtctcgtcttgacgctccttcgcgcgaagctgaccgcaggccgcgtcaatgtcatggccttgctctcttctgatcgtgacatttacaccgcgggattttaacgttttttcgaatgcgaaaatctgatctctcggtgtgcggacgtaatcccgttcaggcacatagtttaccggaattaaattgacatggcatttcacgtcttttaacagttctgcaagctcttctgcatgttcgacctgatcatttacgccgccgaacagcccgtattcaaagctgatccgtctgcctgttttctcgatgtaatatttgacggcctccataaggtcaggaagcttataggctttgttaatcggcatcagacggcttctgatttccgtattcggagcatgcagagaaatcgcgaaattgatctgcattttttgatcggcgaaatcgtaaatcttcggaatgattccgctggtggaaactgtgatatgacgcgctccgatgttcagccctttatcgtggttaatgatttttaagaaagcgagcatttcattgaaattatcaaacggctctccgattcccatgatgacgactgagctgacgcgttcatccgtttcatcaagcgccttttgcactttcacgacttgagcgacgatttctcccgcttcaagattccgtttcagaccgccgagcgttgacgcgcaaaatgtgcagccgatccggcagccgacctgtgtcgttacacatacagaattaccatactcgtgtctcattaaaaccgtttcaatcgtataaccgtcatgaagctcaaataaaaatttcatcgtgccgtcttgagatgtctgttttacagccgttttcagcgttgtcagcacaaaattgctctcgagtttttcacgcaggctttttgagaggttcgtcatttcatcaaatgaagaaacccgcttttcatagagccattcaaaaatctgtgctgcgcggaacggcttttcgccattctcggtcagccattgtttgatttcatctaattcaaaagagtaaatggacggctgctcagtccgcagctctttccgtacgcttgtcttttttaattgtgtcatttttatcccttctttctcatgctgctaataaagaaaccgtctgttccgaaataatgcggaagaatttgaaggcttccatcctgaacaaagggtctcgccttttcaggcagccgcttttcaagagacaaatcgggttcaaactcagggtgttcttgtataaacgcatgcataacttcttcattttctgtccgatccattgtacacgtactgtatacgagtgtgccacctttttttactaatggggcgatttcccttaaaatgccgagctggatttctgacagccgtctgctgtcctccggcgtcttcgtatatttcatatcgggttttcttctgatgacgccgaaacctgagcaaggggcatcaacgagaatacggtcaaaccgttctgcgccaaaggcctctcccgcttttcgcgcatccatcgtttgcgcgtcgatgatcgtaagaccgagccgttctgcgccctctttaatcagcttcactttatgacggtgaagatcaagcgatgtgaggctcccctcgttctccatcagttccgcaatgtgagccgactttccgcccggtgcggcgcatgcatctaaaacggtttcgcccggcttcgggtccagcgcccgggcgacaagcattgagctttcatcctgtatggatacccggccgttttggaaaaatgccgtgttcgcgatgcttcctttcaaaagcttaatcgcatcaggagaaaggtctccggcttccgcttccagaccggcattctccatctcattcagcaccgtttccctgtcgctctttatgtgattgacacggagcgtctgcttcggcggaatgagatgaatccggcagattttttcagccgcctcaaagccgtacgcctcgacccactcttttacgagccattcgggatggcttgtctctgtagaaagacggagaaccgggtcttcaatttcagcaaatgacggcgccccctcacgctgcagggagcggagaatgccgttgacaaaggacgcaatgcccttatgcccgcgttttttggcgatttcaaccgcttcatggatggcggcgcgatccggaattttttctaaatactccatttgatacgcggacagacgaagcagctgaatcacccacggcttcaccttattcggcttgcggataaaaggcttcagcatatagtctaaggcgattttattttgcagcgttccgtagacaagctctgtcagcagtcctctgtcctgatcgctgagcgtgttcgttttgataaccgatgtaagaagcaggttgctgtatgcctgattttgctcaagcttctcaagcgcttcaagggcgagctcccggacattaattttcttcatttgctgctcctaacacgtcaccgggctgcacatttttgcctcttacaaaatcttcgcccttcatccgttttttccccgccggctgcagctcagtgattaaaagggcggtgctgtttcctgatgcgacgacaatgccgttttgctccgtgcggatgactgttccgggcgcagcatcagtttttgccgcaactttttcagaagcccatactttaatagtttgaccgttcaaagttgtataggcgacaggccaagggtttaaacctctgatctggttgtagatctcttctccgggctttgcccaatcaatccgctcctgctcacgcttaatgttaggcgcgtaagtcgcttttgattcgtcctgtttgatcggtttaatatttccggagatgacgttcgggacggtctctgacaaaagctttgcccccgctatgcttaatttgtcgtgcagcgtgccgacgttatccgtttcatgaatttccacttcgattttagaaatcatatcgcccgcatcaagcttttcaaccatatacatgatcgtcacgcctgttttcttcttgccttggagaatcgaataatgtatcggcgctccgcctcttaattcaggcaatagtgacgcgtgtacgttgatacagccgtatttcggaccgtccagcagctgcttgggcaggatctgtccgaatgccgccgtaacaatcaggtccggcttcaggcttagcactttttctatttcttcttcgagccttactttttcgggctgaagcacgggaatgccgtgacgttcagcttcagcctttacaggagggggcgtcatgattttttttctgcctttcgggcggtcaggctgcgtaacgacaccaaccacttcatatccgtcttcaataagcgtgcgcaggacgggaactgaaaagtcgggcgttcccataaaaacgatccttgtcatccaatcatccttccatttctgccagttcttcttcagtgtagtaagccgtaatttttgatgtgaataaaatgccgtctaaatgatccatttcatgctgaacggctctggccaaaaaaccctccgcttctaaaataaacggttttcctttacggtcgtgggcttttacctttacgtaatccgggcgggtgacatcaccgaaaaccccgggaaaacttaagcagccctcgactccggtctgttcaccgctcttttcaagaataaccggatttacaaggtcgatccggccgctttcttcaccgatgtccacgacggccgctctttttaaaatgccgatttgcggcgcggcgagaccgacgccatccatttcgagcatcgtatcgtacatatcgtcaagcagtttttttaattttttatcaaacactgtcacttcatcggcgggtgtttccagaacctccgccgggtgtgtgacgattttttttacagccaaaattttgccctccaaaaactaatgttacatcagcatgtacggattcatatcaattgaaatcattacatgcttttgcgcaatgtcgcgtttatagtgctccagtatctttttcaactgaatctgcaactcgttttcctgtctgtattttatcacgcattgatagcgatatctatctttgatcctggcaatcggggaagccgccggcccgagaattttcgtatcaggcccgcatcccgctcttaaatagtttgtaatcttttctgcggtgaccgcggcttttgccgcttcttcatgagaaacggtcaccagcgccacgtaataatacggcgggtatgactgggcccgtctgtgcgccatttcctgctgaaaaaaagtttcatagtcgtgcgttttcgtcagctgaatgctgtaatgagacggtgtatacgtttgaatgaccaccgttcccggcttttcatgccgcccggcccgtccgcttacctgtgtcagcagctggaatgtcttctccgcggccctgaaatctgggatgtgaagcgtcgtatcggcgcttaatactccgacaagcgtcacgttcggaaaatcaagcccttttgcgatcatctgcgtaccgagcaggatatccgccttcccttcaccgaacgctgacaacagtttttcatgggcgccttttcttgaagtggtgtccacatccatcctgatcacgcgcgcctgaggcagcactttggtaagctcctcctccacacgctgtgttcccgtgccgaaaaagcggatatgttcgcttccgcattccgggcatgttcccgggacaggttcctcatggccgcagtaatggcatttcagcctttgtccgtagcggtgataagtcatggaaatgtcgcaatgcggacattgcggcacataaccgcagtcccggcacatcacaaacgaggaatacccccgtttattcagaaaaaggacggcctgctctttttttgcaagcttctcttccagctgttccatcagctctcttgagaacattgatctgttgccgtttctcagttcttctctcatatcaacgagagaaacgtcaggcatgagctggcggtttacgcgatgttttaacggaagcagctcataaacgccttttttcgcccgcgcaaatgactccaatgtcggcgtggcgctcccgaggacgaccggacagctgtgatgctcggcccggcggatggctacgtccttcgcatgatatcgcggcatttcctcctgcttataggaagattcgtgctcttcatcaataatgatcatgccgagattttcaaacggggcaaagatggccgatctggctccgacgacaagccggacttccttgcgctgaatcttccgccattcatcgtatttttcacctgtggataatccgctgtgcatgaccgcaacctgtgagccgaagcggcctttaaaacggttgaccatttgcggtgtcaacgaaatttccggaacgagcacgatggcttcttgtccttttgccagcactttttcaatggattgcaggtaaatttccgttttgccgcttcccgtgacgccgtgaagcagaaagacgtgatggacatggtcggctacagcttgtttaatcggctcaaaagcggcctgctgctcttctgtaagagagagcggctctgtttttttgaacattctgtcctgataaggatcgcggtaaacctcctcaaagctttccgtaagaagcccctttttaagaagcgttttcagcgtcgcggaactggaatcggtctttttgcaaagttcagccgcggaaatcttttctcccccgccgataaaataagtaagcacggcgagctgtttagaagcctgctttgtcaatgaatctgcgtgccgggcgagttcttctttgtctgcccccgcttcaatcatgcggatcatttttttattcgttttttgggcgactttatatgtgacatcaatgcttcctttacgcacgaatttctgaagtgacgaaagaatgctttcatcggtaatatccgagtacagaagacttttttgattcctgaaaagctgtttgatgtccggtgtcagcgcttcttcgtcaacgactttcagctctttctcgtacttcgccttcaatgcggcgggcagcattgcctgaagcgccgtgattttaaacgacagcgttttgtcagaaagccatgaagacagctgcatcagttcctcagtcagaacaggcgtcaaatcaagaagcttctcgacttccttcattgagccgccgtttaattcggacgaatctttcaaaccggtcacaaatccttgaagcttgcgcgggccaaacgggacaatcacccgcatgccgacttcgatcatcccttttaaatgatcgggaattttgtaatcaaagggtctgtcaatgtttttggagctgacatcgacaatgacttctgctacattcatacgggttttcggtcctcggctttcaaagctgtcatttccttcagcatttcaaaggaaacgtcaagtttagacataagcgcaagctcccgttttcttccgtcccggaaatagaaggtgacgacattcgtatccgtgccaaatccggccccttccgctttcacatcattcgcaacgatcatatcaaggtttttctgttcgagttttctgcgcgcatagcgttcgacgtcttgcgtttcagccgcaaatccgaccagcagctggtgtgttttccgttcgccgagttctttcagtatgtctgccgtacggttgaattcgatcacgagcgaaccgtctttcttcttcattttgtgatcagaaacagccgccggcgtaaaatcggccacggccgccgtcttaatcaccatgtcgcatgaatcaaacacagaaagcacggcttctctcatatcggctgccgattgcacaggaagaaactgatacagcccgactggcggctctattgacaccgggcctgaaatcagcgtcacccgcgccccgagacggacggcggcttcagcagcagcgtagcccattttgccggtggatttatttgtgaagaagcggacagggtccacggcttcgcgcgtcggaccggccgtaatgacaatatgttttcctttcagcggcgcatcgtcttcaggctccttaaaatgctctctgacacgctcaacaataagctccggctcctccagccttcctttgccgacatatccgcatgccaaatagccttcactcggctcgataaagcggaccccgtcctgataaagcacagagatgttccgtttcaccgccggatgatcatacatatggacattcatcgcaggcgccacccagaccggggcctcagccgccagcaccgtcgttgtgagcatatcatcagcaattccgttggcaagcttgccgataatatttgccgtagcgggcgcgacaataattaaatccgcccagtcagcggcatcaatatgagaaatcaccttcggattttgttcattaaatgtatctgtatacacttcattccggctcagcgcctgaaatgtcagcggagaaacaaactcacgcgcggactcagtcataatcactttgacatttgcgccggcctgaaccagcttgctcgtgagtgcggaagctttataaacggcaattcccccgcttacgcatagcaaaatgtttcggtttttcatgaagtcttctcctcctttatgaaagcattggacaaatcccaaacggaaaaaaataacaacctatgtagagataggttgctacgtgtgcttgttattcgctgtcttctctttcaaacgaaagcaggcccgcgtcaatttcttctaaagctttgcctacatatttgtgagaaatggtatgttcaatctgctggtcctttttgatctgcatttcacgcgcgcgtcttgcagacacagtcaccagcgtatatttagaatctaatttattcattaaagagtcaattgacggatctaacataagttattctacctccagcattttcttatatctcggagcaacgcgttcacgttttaagtgctcggcgagaacgattgcgttaatcttatcacaagccgtttggatatcgtcgttttcaacgacataatcatacgcgtccatcatttcgatttcagcttttgcggcattcattctgttttcgattaaatcgtcggtttcagtccctcttgtcacgattctgtttttcagctcagaaagactcggcggcgctaagaagataaacaggccttccggaaatgcattccgcacttggagcgcgccctgcacttcaatctctaagaagacgtcttttccttcttgaagcgtctgttcgacataatcaacgggcgtaccgtaatagttgccgacatattctgcccactcaagcagtttgttgttttcaatcatgcgctcgaattcatctctggatttaaagaaataatcgacgccgtcgacctcgccctctctcgggtttctcgtcgtgactgaaattgagtattcaaatttcgtgtcctgttgtgaaaatattgcttgccgaaccgttccttttccaactccggagggacctgagagaacgattaataaccctctttctttcatgcggcaattacccctgcccttcatccataatttcttctttcacagaaagtctgtgtgcaactgtctcaggctggacggcagataagataatgtgatcactatccatgacgacaactgcacgggttcttcgtccgtatgtagcgtctattagcattccgcggtctcttgcatcctggatcattcgctttattggcgcagactccgggctgacaatcgaaatcatccgattggcggagatgatattgccaaatccgatattaatcagtttaatcgtcatcttctacgttccccctgtaaaatagacgtctctagtgtaacctgaagagaccgtctgtaaacaatacgcacagtcgctattctatattttgcacttgttccttcaatttttcaatagaacttttcatttcaacgacaagctttgtgatttgatgatcattggcttttgagccgatcgtgttcgcttcccggttaagctcctgaacaaggaaatcaagtttgcggccgactgccccgccttcttttaatatatcacggaattgaacaaaatggctcttcaatctggtaatttcttccgttatatcagaacgatcggcgaaaatggcgcattccgtgatcagcctgctttcgtcgagcgcgtcctccgtccattccttcattcgggcgtaaagacgctcgcggtattgaataacaacggccgaagcgcgctctttcacctgttcggacagcgtctcaagccgctcaatgtgcagaaagcagtcttccgccaaaagccggccttctttttccctcatgtcacaaagttcctttacagccagctcagcggcttccctgatgacttcttcaagcttgtcatcacgcatctgttcttcgtgaatctgcgcaatatgttcaaatctaaagaaatccattgcatcgggttctgcggccaggctgtagcgctctttcatggcgcgtgcggcgctcacatattcatcaaggagctcccaatcgatgttcaggcttctttttatgagcgcgtcactgttgacagtgagaaacagctctactcttccgcgctgtatatgctgcaatatcgtttgtttcagcttatcctctacatatagcaaaggccgtggcaggcgggcgttcacttctttgaaccggtaattgacggatttcaattcaacggttgccgagagatcgccttttgtgctgcttgcgctgccgaagcctgtcatactccgtatcatatgaaacacccaattctttcccgttatcaaaataaaagggcaatagacatgctattacccctaagattatatcatatggaattatttttttcttgtcaaaagtgaacccgccagcaaaaaagtaggtatgccagacatcccgataatcagcatccaatcgcccggcgtaatcggcactgttttgaaaatcggctgcagcggcggataatagatgacgatggccatcaggaagacagaagaaacgatggcgccgagcagataaatattttcaaacggattccgggagaaaacagacgtttcgctccggcagtcaaacacgtgtataagctgagccaggacaagagtcgcgaatgcaacggtctgtgcgtagggcagattttcaggattgcggtgatagacgatgataaacgctaaaatggttgcggctccgattaaaaaccctcttgatacgactttccagcccagttttctcgcaaacactccttctttcggatgccgcggcttccgcctcatcaggtctccttccggctgatccataccgagggccatcgccggcagcccgtcagtgactaagttcacccacaatatctgaatcgggacgagcggcagcggcagagcgagaagcatcgcaaacagcatcactaaaatttcaccgacgttggaggccagcaaataccggacgaattttcttatattttcatagatattccgtccctcttttatggctgatttaatcgtagcaaagttatcatctaccagaatgagagaagaggcttcctttgccacatccgttcccgtcacgcccatggcaacaccgatatctgcctgctttatggccggcgcgtcattaaccccgtctcccgtcatggcgacgacgtgtccgttttcctggaacgctttgacgattttcaatttatgttcaggtgacacgcgtgcgaagacgtagacatcatcgaccgtttcgataagttctttgtccgtaagctcattcagcgtcttgccgtccatcacacgcccctttttcggaagaagacgcaaatcttttgcaatggcctttgccgtttcgacgtgatcccctgtgatcataaccgttttaatgccggcttcacggcattctttaatggcctgtctgacctccggacggggcggatcaatcatgcctgacaagccgagcatcgtcagatttttttccgcctgctccattgtcggcttttctccgggcttaagcggtttataagcaatcgcaatcgtacgcaaagcttgcgacgccagctctttcagaaccgcttccgtttctgctttcttttctcctgaaaaaggcgtacttcttgcgccgtgcatcagatgtgacgagcggtcaatcagcacatcgggcgctcctttagtgatgacgaactgctttttttcctgatcctctacaatgacggtcatcattttgcggacggagtcaaacggaaactcggcaaccacgcggtaatgcccgctgagccaatcgtttgaatagccgccctttcttgcagccgtcagcagcgctccttctgtcggatcaccgtcgagtacataacggccgtctttcagtgcgatttcagatgtgttgcacaacgcgccgaaaaccagcatctgttcaagaatcttctcatctttcggcttgatttcccgctcatctcgggtgaaaacgccctccggcacatagccgatgcctgacactttataaattttgccgcctgaccacatatgggtgacggtcattttgttttgtgtcagcgtgccggttttatcagaacaaatgacagaggcgcagcccaatgtttcaaccgccgggagctttctgacaattgatttttgtttgatcatgcgctggacgccgattgataatgccaccgtaacaatggcgggaagcccttccggaattgcggcgacggccaatgacaccccggccaaaaacatgctgtaaagatcatgtccctgtaagacgccgactgcaacgaccaataccgttaaaaggagcgcgacgataattaaaattttgccgagctcttcaagtcttcgctgcagcggtgttgaaaggctgccggcggattccagcatatcggcaattttccccattgccgtattcattcctgtaccgacgacgacgccgacaccgctgccgcgcgttacgatcgtacccataaacgccatattgctgatgtcgcctaacgaaacatccggctttctcaatttatcggcttgtttaaccaccggaattgattccccggtcagcgccgattcctcaatttcaaggcttttcgcttcaacgatccgcacatccgcgccaatccggtcgccgcttgaaaatttcatgatatcgccgggaacgagctccttggactgaattttcttccagctcccgtcccgcaacgctgacacatacggcgttgacagctcttttaatgcatgtaaagacttttccgcccgccgctcttgaaaaaaaccgagaaccccattgacaaatacaatcgccataatcgctacggcatctacatattcgcctaaaaacccggatattaaggttgccgccagcagcacgagcaccataaaatctttaaattgggcgaaaaacacggcgatcgccggtgtcctcttgccctcctgaagctcgttcggcccgtgcttttcaaggcgttttttcacctctttttcggtcaacccctgtttaatggacgtatttgttgctttcagcaaatcggtttgtcccatttcatgaaacttcattcttctcgtccactcccctgcctcgctttagagatgtcactctgtaaacaagcttattctgactcgtcccttttcatgctataattatcgaatgcaggaagaaggaaagggtgttttatatgtcttttgatggcatgtttacatacggaatgacacatgaattaaacagccggatcgccggaggacggatcacgagagtccatcagccttttaagcacgatgtgatattccatatccgcgccaacggaacaaaccacaaattattattgtcggcgcatccgagctattcacgggtgcacatgacaaaccaggcctatgaaaatccgagcgagccgccgatgttttgtatgctgctcagaaagcatatagaaggcggatttattgagaaaatagaacaggccggattagaccggattatgatattccgcataaaaagcagaaatgaaatcggcgacgaaaccgtaagaacgctgtatgttgaaattatgggacggcacagcaatattattctgactgacggagaaggatccatcatcgacgggctgaagcatttatctccgtcgatgaacagctaccggaccgttctgccgggctatgattacaagcttcctcccgctcaggaaaaaatttcgccgcttgccgcggatgaagaggacgttttgcgttatctcagttttcaggaaggacggcttgaccagcagatcgtcagacatttctccggtgtttctccgctgtttgcaaaagaagccgtgcacagagcgggtctcgctaacaaaataacgctgccgaagacgctgattgaaatgttccatgccgtgaaagattgcaggtttacaccgaacattacgacagccggcggaaaggaatacttttatctcctgtctctcacacatgtaaacggagaggagcgcacctttcactcactgagtgagctgttggaccggttttatttcggcaaagcggaacgcgaccgcgtcaaacagcaggctcaggatctcgagcgttttgtcgcaaatgaacggaaaaagaatgccaataagataaaaaagctggaaaagacgctcgactactcagaaaatgcgaaggaattccagctatacggcgaactgctgacggcaaatttgtatatgctgaaaaaaggtgacaaagaagcggaagtcatcaattattatgatgaagaaagtaagacggtgaccatccctttaaatccgaacaaaacaccgtcagaaaacgcgcagatgtattttacaaagtatcaaaaggcgaagaattccgtcgaggtggtaaaagaacagatccgtctggccgaggaggaaatcgcttatttcgatcagctgatccagcagctctcctccgcctccacaaaggatattcacgaaataagggaagagcttgtggaaggcaaatatctgcggccgaaacagcagagaggacagaaaaaacagaagcagcacgttcctgttttggagcaatatgaatcttcacggggattgacgattcttgtcggcaaaaacaataaacaaaatgagtacttaacgacaaaagctgccgcgagggatgatttatggttccacacgaaagacattccgggttcccacgttgtgattaaaagcagcgatccggatgaacaatccatactggaggcggctgcgatcgccgcttatttttccaaagcgaaagattccggctccgttccggttgattatacaaaaatcagacatgtgaaaaagccaaacggcgcaaagcccggatttgtcacctatgacagccagcataccgtatttgtcacacctgatgccgaccttgtcatacggctgaaaaaataaacgcacctccaagctgaaacccgcactcggcttggaagtgttttttattacgtataaacggagacgaaactctcccagccgtcagaaccgatctttacagtatctgatcagtttcccgtcatgtctgcatgatccgccgggccgtctgtgatttaaacggtcacacctgatttggcggcggatactttcaccttccctcgccgaacctgagcacatccgggcgggtctctgacctttcctttgtatgcgggcgaaatccaggcggcatcgggatcacatacatattccgcatcacttcgcaatcctgaccgcttgtcggcatataccattcaaactgcccgctttcgttttgaatttttcacattcggcggactgtcaggacagtataaaaaacaccctgcctgatgacagacagggtgttttttatggtcttcttcttttctcaaataatcgatccacttcttcagccaaatcagcagtaatgagaggctttatgtcctcagccagtcttttcgtatgtgcagggcttgcgccgcttgttgatacggatacttgaatgcgccctttgcggatgatcttcggcatatacacgctgccccgttcagcctcgcttacacaattgaccagctgcgtttcagaagcgccctcggttatctcccgattcacgttgcggtcatttgtcgcggcaatgatgaaaaaagcgggcgcgagatccttcatgtcaattttacgggaaacccagcggatacgtccttcatccgccagctgtttaatttcaggcagggcatcgggactgattacagtaatatccgcgccttccgaaagcactgttttgagtcttcttaaggcaacattgcctccgcccgcgatgacaattctttttccgctgagattaatgtgcagaggcagcatactgtccccccttaaaatcaaactgcccgccggggtttcggacagcttccgtcacacggttcaaaaacgcctgcttaatatgcgggtgaaaacctaagtatgaagcgagatgaacattttgattgaccgtttgaagcttttgaacttcccgttcaatctcagtcattaaaagcccggtaaacagaagatatggaacgataaaaacgggtgctccgtcatcctcttcaaggccggcaaacacttctttatagtgcgggtcacatgctgttaaaaaacaagggatgacttctttaacaggtgtaatcgcctcaagttttccggcaatctcactgactgcgcttttaactgccggatctgtgcttcctcttccgatcagcaccactttcgcctgctcaatggacactccggtatcttcaatgcgatgatgcacggcttttacgacttcatcgtccactccgatcggaacaccatatgtcacttttatatcgggatgcagggccgccgcacgggcgatttcagccggaatgtcatgtttcgcgtgggcagcggtcaacagcagcaaaggcacagccgcaatatgagtggcgccttgtctgacacaagcttcaaatcccgcttcaatagacggttcctgcagttctaaaaaacagatttcctgaatgggagcgtcagcgtgtggcatgcacccttttaaaaacgccgccgactctgtctgcgcttttttcagcctgcttccgtgtccgatatataaaatcgcctgcttcatttacaacgcctcgctcaaatccggatttttctgatcagatgcataccagtccagtatgcagtgataattgacgacatcaccgataacaattaaactcgggtttttgatttcttcttttatcactgtgtctgaaagcgtgccgacggtgcagacgactgttttttgcctgtccgtcgtcccccaatgaataaaggctgccggagtgccgccgtctctgccgttttccagcagcattctttcaatctgccggatatttttaattcccatataaatcaccagcgtatcaatgcccgtcgccagcgctttccatttttcttcaaagtcgtcttcttgtttataatgccccgtaacgaatgcgacattggagctcgcctctctgtgcgtcaccggaatgccggcataagcagcagccgcgattcctgatgtaatgccgggaacgatctcaaacggaatggcgttttgcgcgagagcctccgcttcttcgcctccgcggccgaaaacaaacgggtcgccccccttgagccttacaacggttttcccctttttcgcatacttcacaaggaaacggttgatcgtatcctgtttcataatgtgaaaatccgggagcttgccgcagtaaatcagatccgcttcttctccggcgtactgtaaaatctctttgtttaccaatctgtcatataatataacgtccgctttctgtatggctttcattgccttcaccgttaataagtccggatctcccggaccggctccaacgataaatactttccccatagcatgtctccccgatccgttttgaaatcttcccagaacagccgcgaggccgcacttcagctattttaccatatcccgccattgcgggggatatccggctgattgcgcggcctttttggacctattatgctaagctgtttttcacaaagtcaaccagtcttccggtgcattcttcacgttcaaatttgcctgaatcaagtacgagctcaggcgctttcggctcttcatacggtgagtcgatccccgtaaagaacggaatttcaccatttcttgcttttttatataaccctttcggatcgcgcttttcacatatatcgaggtcgcatttcacgtagatttcattaaattcgccctctgccacaagctctctcacctgatctctgtcctcacggaacggagaaataaaagccgtgatgacgatggttccctgctgaacgaaaagcttcgccacttccccgatgcggcgtatattttccttgcggtcatcatcggaaaaacctaagtccttgtttaagccgtggcggatgttatccccatcaagcacaatgacttgatagccttgttcaaacagctcgcgcgctgcggcgtttgcaattgtggatttccctgaaccgcttaagcccgtcagccagaggatagagcttttatgcttgtttttctgctggtattcttctttcgttattgaggcttcatgccatacgatatcacgatttgtcactctattttcctccttaagaaacgcctgcttcttctttcgttttcagccctttaatcaacacctcgacaacttcaggacggctgaattccgccggcggcatgacgccgcttcgcagcatttctctgacctttgttcctgacagaatgacgtggtcttctctgtcatgcggacatgttttggccgttcccatgttgccgcatttctggcagaagaagctgtgctcgaatttcatcggtgtaattccgagttcatccgctgtaaattgatcaaacagctcttgcgcttcatatgtgccgtagtaatcaccgacgccggcatgatcgcggccgacaataaaatgcgtgcagccgtagtttttgcggacaagcgcgtggaaaatggcttctctcggccccgcataccgcattgccgccaaaaacacgccgaggaatacgcggtctttcggataataatgatcgagcagcacctggtagctttccattctgacatccgccggaatgtcatctgattttgtttcaccgacgagcgggttcaaaaacaggccgtcaaccgtctcaagcgcggttttttggatatattcgtgggcgcggtggaccggatttctcgtttggaaaccgacgatggttttccagcctttttcttcgaagcttcgtcttgtatcggcaggttcaaatgtaaactcaggaaactgctttgacgcttttttaattaatgtgatcggcccgccgacatacgtatcgccgcgtgaaaataattttttcacgcccggatgcgcggcatcatcggttttatatacgtgaacggcttctttttgtttatccggcgtataaatatcttcgatgtcgacgacgccgtatgtttctccgccgtaagtcagtttcaccgtgtcgccgacggcaagctcagccgctttttctgaatcgaccggaagcgtgatcggcagggaccagacaacccctgatgctagacgcatattttcaacgactgatacgtaatctttttctgtgaaaaatccttcaatcgggctgtaccccccgatcccgatcagctctaaatcagcgaacgaaatcaaatcaagctcaatttctttgtggacggatgtaagatcatactgctcattcacccgattaattaatgttcctccgtgcggtgctaaactcataatacatgattcctcccagttaacagataaataaactcagattaatagttaaatgcccccgccttgttcatggacagagcgtttctcttttcggatggctttcatcagactggcggctccgccagctgccaaaagcacgctggccatcataaagatggaatagtaatctccttttaacagcagggagacaagcagatacgaaatcgacagtgacaaaaacggcgaaacaacccatactttgagcatcgttttcacgacttctttatgaaaaacgttcggcccgtttttggccattccgataccgataattgatgatgatgtgacttgcgccaatgggaccggcagaccgaagacggaactgataatgacaagccccgcaccggttcctgaaagcagtatgccttctccggctgaaaacctcgtaatctttttcccgttggtttcaagcactttgcgtcctaaaagcagagcgccgagagcgacaaagatgcctccgtacagcgttccttttgacacgctgagtacgcccgcagccaccaaagggcccaccgcatttgcgacattgttcattccggctgaaaaagcttcccaaaaccccgcaaaaagcagcacaattcctaaaatcttctgtttccgtttcgaaatgactcgaatattcagagaactgaataccttcgatacgagaaaagtgaaacagaacgcgacgaacggtacgagcacccaaaaaatcacgatgaccaaaagatgctgtaaaaacaatactttgtacgcgacgccgacaccgacaatcgccccgacagtgacctcactcgtcgacagcggaatgccgagcacattcgccgtgaataacgatagcgccgccgctccgattataatgcagacaatggtgagcgtaatggtttgttcgggaatgattccgccgctgatcgtcttaacgacttcaccgccgccgataaccgcccctgacaggactccggccgcgcagatgatcagcgcatacgttttctttttaacggcgccggacccgtaagcgactcccattgatgccgcggctccgctggctccgatattcatggcaaaaaacagacagaataaaatagcggctaattccatcgggcagctcctttattcatgcagtccgcattctgttttcgccatgccgttccatctgccgctccgcaaatcttccgcggtaaacgcaggtgaagtgcacggttcacagccgatgctcggatacccctgatcatggaggatattgtaatccagctcatgcttggaagtatatctccagatgtctttccatgtccaatggatcagcgggcatactttaatcgattgaaacttgtcgtctttattcaggaaattcgtattcgcccggctcggcccttgatcccggcgaaggccggacagccatgccggatgccctgcgagcgcttctcttaacggcagaatttttctgatgtagcagcactggttcggttctctttcccacagtttatctccgtgagcctcggcctgttcctcgagagtaaggctgggctttttcaggataatgttcagccccggataacgttctttcactttttcgatcgtttcatatgtttctttaaagtgaagacccgtatcgagaaacacgatttccgcgtctttctttactttagaaattaaatcgatcaggacgatgccctcaatcccgaagctgcacgcgtaaacaagctggtctccgtagtggccgtatgcccattttaaaacggacagcgcgcctttataggaatcgtcttccggaaatgtaatcgccggttcctcccatgtatcatacgttagcattttttctttcctcctcccggagacaatcaaacagttgttgttctctgccggttgtcttatccctcaatctttttttcatataaaaaactttcaatccagcggaatgaaagacagtgacccggtatagcccttatcttcaaaatgctgtgcatttttctggatgcggcaccttgcaatacacgcaggttgccgggcgtcatcggtccagtccctcagccgctcttgataagctttttagatttgtactaaattttagcacaattctaacagaagtcaacccgagttttttgataggaataataaaacaggccctgaggcctgtttttattgtcattattttttaaaccaatcttttgactcgggattcagtttccatgatttcagtttttcaatgtcagctgaatgaatcgtaccgttttcaagcgcgacttcaatcagcgtgtcataatcggttaacgagtaataaggaagacccgcttttttaaaggcttctgttgctttcggcagtccgtatgtaaaaatggaaatgacgccgaggacttccgcgccctctctttgaagggccgccgcagcttcaagcacgctgcctccggtagaaatcaagtcttcaatcacgactgttttttgtcctttcttaatggcgccttctatttgatttcctttgccgtgcgctttcggtttgcttctgacgtagcacatcggcgcgcctgtacggtctgcgagaagcgcagcatgcggaatgcccgccgttgcagtgcccgcgatcatctccgcctcggggaaatgctccttcagcagtttgccgagcccgtccgccacatcatttctcacttttggatacgacaatgtcagacggttgtcacaatagatcggtgataaaatgccgctcgcccacgtaaacggctcattcgggcgtaaaaagacagcttcaatgtgtaatagatgttttgcgatagcctgtttcatcggcgaacgccctcccattccagtttaattgcttcatatgctttaacggggttttccgcttttgtaattgagcggcccacgacgatggctgacgaaccgttttctttcgcaaatgacggagtcgccgtacggacttgatcgtcagctgcgtcactggcggtgcggatgcccggcgtgactgtcagaaatgaaggccggaccgcttcataaatggcttttgtttcatggaccgaacataccactccgtccagcccgcactcttccgccattttgccgtaatgcacaaccgtttctaacagcggcttatgcagcagaagctcttccttcgccacctgctctgaagtgctggtcagctgagtcaccgcgattaaagacgggcgttttctgcctgccggcgtgccttcttcaagcccctcaagggccgcgcgcatcatgcgtgcgccccctgccgcatgcacattgacgagatcaacgccgaggccggccagccgcttcatcgctttattgaccgtagtcgggatatcatgaagctttaaatctaaaaatatatcacagttccgttcttttaattggtgaatgatggcggggccttcctgataaaaaagttccatccccgttttgacaaagagcctttccttttcaaacaagtctaaaaacgttaaagtctcttcccctgatgcaaaatcaagcgcgatgatgggcaggttgtttttcatgtttccagctccttccgatgcattcacttacagattgaaagccgtgttggcgcagcacgtgggggagctgttctatgatttccgggcagacgaacggattgacgaagttcgccgtgccgacggcaaccgcactcgctcccgcaagaagaaattctaatgcatcctctgcggtctgaacgccgcccatcccgataatcggaatttgaacggcctggctgacttcgtataccatccggatggcgaccggtttgatcgccgggcctgacagtccgcccgttttatttgctaaaatcggccggcccgtcttgagatcgagcctcatcccgatgagagtattaatcatcgtcagaccgtcagcaccggccgcttcaatcgctttggcaatttcggctatgtttgcgacattaggcgaaagcttcacatacacaggcactgcggaaacttctttcaccgcttttgtcagttcggccgccatgacgggatcagtaccaaaagcaatcccccccgttttgacattcggacatgaaatgttaagctcaagcgcatgcacattcggcgcttggctgatgtgctcggccacttctttatagtcgtccacctgagaaccggcgacatttgcgataatcggcgtgtcaaattgttcgagccaaggcagctcgtgattgagcacatgctcaaggccgggattttgcagtccgatggcattcagcattcccgcgcttgtctccgccactctcggcgtcggatttccgaagcgggcttcgttcgtcgtggctttaatcataatgcctccaaggcatgataaatcgtaaaatccggcatattctttcccgaaaccgaaacatccggaagcggggatgatcgggtttttcaattggagacccggcagattcacctctaacattacagcgccacctcctcagctttaaataccggcccgtcaaggcagacctttacataggatgtatcgctttcacccgtgcggcacacgcaggcgaagcaggccccgatgccgcagcccatccgctcttccatcgaaagataaacctctttatggccgtactgctgcttcagagctttcagcatcggtgtcggtccgcagcttagcaggacatcgaattcgagctgcttttcacggatgatatcggtgacaaatcctttctctccatatgttccgtcagccgtcgccacataagtgtctccgtacgcacggcattcctgttcgtaaaaaacatcctttgctgattgaaatccaagcacatgaatgacgtttacgcctttttccgtcaggcgctttgacagttcctgcaaaggcggaacccccactccgcctccgactaacagcgcggttttgccgggttcaatccgccgcacgggaaatccgttgccgagagggccgagaacgtctattttgccgccctcttttttcccggacaaaaggcgcgttccctcaccgtcagctctgtagataacggatacttcatccgcggcgaaattgacgtccgcaatgctgagcggtcttcttaatagcggtgtgaccgcgtcactcaccttcagatgaagaaattgtcccggctcggtaaggtgccggacaagctctcctttcagcaccatcttataaatccggtcggcaatttctaagttggattgaacagtcaaatgcgcttttttcatatcgtgactgccgccttttgattggtttcggatgcaggcatatgatccgcccggaatgtcatgctttccaatacccgcaaaatggcttcggccgtatctaaagatgtcaggcaggcgactccgttctcaacggattcgcggcggattctgaagccgtctctggccggctgtttgccctttgtcagcgtattgatgacaaattgcgcttctccgtttctgatcacatcgagcagatttttcccttcttcgccgattttcccgacgacttgagccggaatctgagcgtctttcaaataagccgccgttccttccgtcgccaagattttatagccgatggcgtggaaccgcttggcgatcagcagtccttcttctttatctttatcagcaacggtcaacagcactgaaccgtagttcgggatttgaatgcctgaggcaatcagcgctttatagagcgctttttccaaggttgaatctttgcccatgacctctcccgtcgacttcatttcagggcctaacgtgatatccactcttctcagcttcgcgaatgagaagacaggcgctttcacgaacaccccctgctgttcaggctgcagcccctcttgatagccgaaatcagcaagcttttggccgagaatgacctttgtcgccagattcgccatcggaatcttagtgattttgcttaagaacggcacggttctgcttgaccgcggatttacctcaagcacatacacctcaccttgcgaaagtacgaactggatgttcagcaacccgatgatgttaaggccttttgccaaggcaacagtgtattgttcgatttttttcttaatgtctccgcttaaagactgaggcggatagacggcgattgaatcccctgaatggacgccggcccgctcgatatgctccataatccccggaataacgactgtttcgccgtcagatacggcatcgacttcgatttctttccccgtcagataacggtcgattaacaccggatgctgcgggttgattttgaccgcatttttcatatagtgaagcagttcttcttcgtgatagacgatttccatcgcccggccgccgagcacatacgaagggcggacaagtaccggatagccgatggatgcagcgattttgaccgcttcgttcaccgacacggcggtttttccgagcggctgcggcacattcagcgcctcaagcgcctgctcgaacttatcccggtcttccgcacggtctaaatcttcaagtgatgtaccgagaattttgacgccgcgggcgctcaattcttccgcaaggttgatcgccgtctggccgccgaattggacaacaacgccttccggctgttccaaatcaatgatgtgcatgacatcttctaccgtcagcggttcaaaatacagtttgtctgatatgctgaaatcagtggacaccgtctcagggttgttgttgataataatcgcttcatatcctgcctgcttaatcgcccagacagagtgaacggtcgcatagtcaaattcgacgccctgtccgatgcggatcgggccggagccgaggacgacgacgctttttcttgatgttacctcagactcgttttcttcctcatatgtgctgtagaagtacggggtttctgattcgaattccgccgcgcatgtatccaccattttatatacaggcttgatggctgcttcttttcgcatttgatacagctcttgttccggcatattccattcccggctgatatatttgtcggagaaaccgagttccttcgctgtctgcaggacggcgaggctgcctttttccgctttcagctcggtttcaaaagcgaccagcttacagagcttgtgcaaaaagaatacgtcaattgcggaaaactcatgaagctgctccactgtgtagcctcttctgaacgcttctgcaagataaaacagccgttcatctccggcctttctgatccgtttttccaaaagcccgtcagaaatctcttccgcatccttcagttccaggtgatagacatcggcttccagtgagcggaccgcctttaacagcgattcttcaagggtgcgtccgatggccatgacctctccggtggctttcatctgcgtcccgagcctgcggtttgccgactcaaatttgtcgaacggccagcgcgggattttagaaacgacatagtcaagcgcgggctcaaaagccgcatatgtttttcccgttacgggattcatcatttcatcaagagaaagcccgactgcgattttcgccgcaagctttgcgatcgggtaacccgtcgcttttgaagcgagggcagatgagcggctcactcgcggattcacttcgataatgtaatattggaagctgtcgggatcgagcgcgagctgaacattacagccgccttcaatgccgagcgcgcggatcagctttaatgaaacattgcgcaaaagctgatattcccggtcgctcaaagtctggctcggggcaacgacgatgctgtcgcccgtatggatgccgaccggatcgatattttccatgttgcagacgacgatcgcgtgatctctgctgtctctcatgacttcatattcgatctctttgtaaccggcgatgcttttttccagaaggcactgatgaacggggctgagctttaatccgttttcgacgatctctttcagttccgcttcattcgagcagatgccgccgcccgttccgcctaatgtgtaagcggggcgcacgataaccggaaacccgatccggccgacaaattcctcggcttcctgtaaagtgcggatgatctcactttccggcaccggttcattcagctcattcatcagcgtacggaataagtcgcggtcttcagcctgctggatggcggacagctttgtgccgagcacttccactccgcattcctcaagaaccccgagttcagacagctcgacggcaagattcagtccggtctgtcctcccagagtcggcaggatggcgtccggccgttcttttctgataatacgcgtgagaaactccggcgtcagcggttctatgtatacccgatcagccatttccgtatccgtcataatcgttgccggattcgagttgacgagaatgacttcatagccttcttcctttaaagcgagacacgcctgtgtgcccgcataatcaaattccgccgcctgtccgataataatcgggcctgatccgatcactaaaatctttttaatatctacgcgttttggcataccgcttccccttctttctcagttgtttcgatcaagtcaatgaatctgtcaaataagtgattggcgtcttccggtcccggtgaagcttcagggtggtactgaaccgtaaatgccggcaatgttttatgcttgagtccttcgatcgtttgatcattgatcgcaatgtgcgtcacttcaagctctgtctcatctattgaagaaactgtatatccatggttttgggctgttaaagcgactttccctgtcgcaagctctttaaccggatgattggaacccctgtgtccgaatttcattttttccgtttccgctcccgatgccagcgcaaataattgatggccgagacagattccgaataacggcaccttcccgagtatgccttttatcatttcaatggcttccggcacatctttcggatctccgggtccgttagaaagcatgatgccgtccggcttgagctgaagcacttcttccgccgttacattgtacggtacaacgatgacatcgcattttcttttgtttaactctcttaagatgccgtgcttcataccgaaatcgacgagcacgatgcgtttgccgcggcccggactcggatatgccgttttcgccgatacttgagcgacttgatttctcggcagttccgtttctttcagccttgcaagaacctctccgacattctcctcacttgaagcaaacgttccttttaatgccccggccgtgcggatcattctggtgagttttcgcgtgtcgatcccttgtaagccggggatttttttcattttcagatactcatcaagcgtgtaagctgagcgccagttggaaggcagctcgcacagttcttttacgatcagcccttttacaaaaggagtgatagattcaaagtcatctctgttaattccgtagttgccgatcagcggatacgtcagcgtcacgatctgcccgcagtaagaagggtctgataaaatttcctgataaccggtcattcccgtgttgaatacgacttcacccgcggtatgctccaggctcccgaatgcttcaccctcaaataccgctccattttccagcactagtcttcttttcatttgacgagtctcccttcttcatatgcaagcttaccggcagccatcgttgcaacaggccagccgaagcacttcatcttgttgaatggcgtattttttcctttagataaaaatgtatctttgtcaatggccgcttctttgtccagatcaattagggtgatgtcagccggcgcccccggtgcaagcgttccgtacggaagaccgaatgcctcgcaaggttttaccgtcatgaaatcaaccagctgcttcagcgtccacgtcccgtttttcacaaaatgtgtgtacagaaggggaaaggcagtttctaacccgacaataccgaaaggcgcaagcttcatgtccgtgtttttctcttcttctgtatgcggcgcatggtcagtggcgatgaaatcaatcgtgccgtctaaaagcccttcaatcagcgcctctctgtcctctttgctgcgaagcggcggattcatcttaaaattggtatcaagtcccgggatatcttcgtcacaaagcagcaggtggtgcggcgatacttccgccgtcacgcggatgcccgctttttttgcgtctcttacggctctgacggattctttcgtgctgatatgacacacgtggtaatggcagcccgccgcttccgccagcagcacgtcacgggcgatatgtaccgcttcacaaatggaaggtatacccttcaggccgttcgcttttgaaaaagaaccttcatgcacgctccctccgtaaataagtgagttatcctcacaatgagcgacaatcgctttatttattgaagccgcccgtttcatggcttcatacatcattccggccgtctgaactccgacgccgtcatcggtgaaggcgaatgcgcccgcttcatgaagcgcctcaaaatctgtcatctcttcgccggtttgtctgatcgtaatcgatgcgtaaggaaggaccctgacagatgaggtttctttgatcctgttttgcagccattccatctgctctttcgtatccggcaccggccttgtattcggcatggcggcgactgtggtaaaaccgccccgcgccgcggctttagagcccgtctcaatggtttcttttttctcgccgcccggttctctgaagtggacatgaaggtctacgagcccaggtgaaacgaacagtccctcagcgtcgatcaccgtttctccgtctttcgctgtcagaagcccggtttccgaaatgaattcacccgttacccggatatcatgtaccgctttttctccctgttcatttaatatccagccgtttttaatgagataagacataagccgcttctccccttttcacattggtttgcagtgctctttttaagactgccattctgatatacacaccattttccatttgtttaaagattcttgattttccgcattccactaatgttgtgtcaatttcgactcctctgttcaccggtgcgggatgcatgatgatagcatgccgcttcatgctctgcgcccgcttttcggtcagcccgtatgcttccaggtagcctttttggtcggcttctgtctgatgcctttcattttggatgcggagcagcatgacgacatctgaagcttgtatggcctcatccgtctgaacacaggtgccgaaggcgtttttctcatcctgccactgcggcggcccggaaaacagcacacgtgcgccgagccttgtcagcacctcggcatttgaccttgccactctgctgtgtttgatatcgccatgaatggaaaccgtcaggccctgaaaggtctcaaattcctcttgaatcgtcattaaatcaagcaatgactgggtcgggtgctgtccgcagccgtctcctgcgtttaagaccggaatattgactctgccggtcagatctttgtaatattcatccgtgctgtgcctgatgacgcaggcgtccgctccgattgattccagtgttttgaccgtgtcgtataaggactcgcctttttgaacgcttgtgctcgtgccgtctaagctgagcacgttcatcccgagtttcttttccgccacttcaaagctgaaccgcgttctcgtgctcggttcaaaaaacagattcgcaacgaattttcccgcgagatcgggacggactgcaccctcttttatcgcttttgcctctcgcagcagttctgtaatttcagccgcgctcagttcagacatcgccgttaaatgattcatgttttttctcctccgtttccgcttgaaggccgtaaaaaacaccccggtctatagactcggggtgcggttaaagagagaagagccgtacagcgtcttcccgttataacccttccaagcctctctggactttctttaaaaggtttacatatgatttagtttttccgatgcaatcgcgtcttcttcatttgcatgcggcaggataaggttcaggatgactccgacgattgccgcaagcgccatgccggatatttggaacccgccttttgatacttgaataaaagcccctccgacgccgatcacgaggatgacggatgtgataattaaatttcgcttgttttcataatcaatgttgttgtcaatcagcattctcaagccgctggaggcaatgattccgaagagcaggaaggaaacgcctcccataaccgcggacggaacagagctgatcagcgctgaaactttgccgataaatccgaagcacagcgcaatcactcctgcgccgccgatgacaaagacgctgaaaactctcgtaattgccaggacaccgatgttttcgccgtatgttgtcgtcggcgggccgccgattaacgaagcgataatcgtcgctacgctgtcccccattatggagcggtgcagtcccggctttttaataaaatcctgtccgacgactttactcagcaccatttggtggccgatatgttctgacatcgtcacgaaagcgaccggcaccatcgcagcggcaatgcccaatgtcactgacggcgtgtagtctttgaaagggatgataaattcaggaacggcgaaccattttgcatcaatgaccggctgaaaattgacgatgccctgtgtcagcgcaaacagatatccgcctataatgccgatcaataccggaatcaagcttaaaaatcctcgtaaaaagatggcgcagataatggtgatggccaaagtgacgccggctacactgaaatgtttcaggctgtaaacgagttccttcgcattcggatcagcatacattgccatattgacggctgtgcttgccagtccgaggccgatgacgatgatgaccggcccgacgaccaccgggggcagcagcttcatcagccaccccgttccaagctgcctgatgagaagcgcgatcaggccgtacacaattcccgccaggaaagcgccgaccatggcagcccccggccctcccgtcgccttcaccaagataatcggtgatataaaggcgaatgatgagccgagataagcgggaatctggccttttgtcaccaagagataggcgagtgtcccgattccgctcgtgacaagcgccactgccgggctcattccgaccagtttcggcacgagtatggttgaaccgaacatggcgaataaatgctgcaggctgaatgacagccaggacaatggattggggacgtccctgactcccaggtttacttttttcttactcatggcgttttcctcccggttgactttcaaatggtataaaaaaacctctttgctttttgcgcaaagaggcatacaaagcccggccgtgtcgatccgcccggctttgtgttttaaaatcctctttgcaaactctctggaatgcatttaaaaagggtggttattcattttcgtaaatggcgaccatatcagtctgatcaacttcgctcagctgaaccatcactttttcagcttttgaggtcggaatgtttttcccgatatagtccgctctgatcggcagctcccggtgtcctctgtcgacaagcacggcaagctgtatcgatgacggccgcccgacatcaacgagagcatccatcgcagctctcaccgtccggccggtataaagcacatcatcaaccacaatgaccttttggtctgtgatatcggccggaatgtccgcgccttttacaagcggctcttcattgctcgttttttttgtgagatcgtcacggtaaagggtgatatcgatttccccgacggtgaccggatttccttcaatctgttcgatccgctcggccagccgcttcgctaaataaatacctcttgttttaatccctacaagaatgcagtcattcattcctttattccgttcgatcatttcatgggctatccttgtcagcgcccttctgatggcctgttcgtcgagaataacagctttttgattcaatcgtgacacctctccattcgtatataagaagaaaaaacccctcctgccagagcatagaggggttcctttccaggaccaagacacacgtgtatctcttctgtcctatccgttatccttctcagcctctctggactgtgttaaagaatctattcagcttgtttttattatttcagaaaagaaactcgctgtcaatggctatttctcaaatgttcaatgagttttttcatatcttcaggaaggggcgcttcaaactccatgtattcgcccgtccgcggatggtcaaaacctaatattccggcatgaagcgcctgaccgttgaaatcaatggtttttctcggtccgtacttcgggtcgcctgccaaaggaaatccgatatatttcatatgaacacggatctgatgcgttcttccggtttcaagacggcactctacgagcgtgaagtcttgaaaacgctcaagcacgtggaaatgcgtgacggcgtttttgctgctttctcttgttacggtcatgctttgtcggtcttttttatctctcccgatcggagcgtcaatcgttccgtcatcatgtgaaatcaacccgtggacaaccgctgtgtactttctcgtcacggttttattgacgagctgattaacgagtgattcatgcgccatatcgtttttggcgaccattaacaggccggaggtatctttatcaatccggtggacgattcccgggcgcatgacgccgttaatgcctgaaagatcgttgcagtgagccatcagtccgtttacgagcgtccctgtcacatggccgggcgccgggtgtacgaccatgccccgcggtttgttcacaaccaagacatcctggtcttcatagtaaatgtccaaatccatcggctctgcaagcacgtccaattcttccggttcaggaatggtgacgtttacctgatcgccgggctgcattttataattcgcttttacggatttgccgttaacggataccagtccctcttttacccattgctgcacttgagtgcgtgaccagttttctcccgttgaagccaaaaatttatcaatccgttcgctcttttgttcaggctgaacggttatctcaaattgattcatgttattgctccttctttttcccgctgtcaaacagcatatgaataaataaaagtattacaccgacgcacagtgaggagtccgcgatattaaaaatcggatagtgataatccacgatgatgacatgaataaaatccaccacttcctggcgcgccgcccggtcaataaagtttccggccgcacctcccagcattaagccgagagaaattccgagtaacatctgcccttttgcataacgctgtatgtaataaacgattccgataatcacggcgatggtaatgacgtagaaaaaccacatttggccggctaaaatcccccacgctgctcccgtgttgcgatgagatgtgatataaagcacctggtcgatgacaggtatgctttgtcccaattccatatggctgacgacaagccatttggtcaattggtcggcaataataataaaaagagcgataagataataaagcacacacgttcctccagtatacagttacttttatcctttatgaattttatcagtaaaagatgccggagtaaaggcagatcataagcgtatgcaaacagacgctgtcactcatacagcgcctgatcatatgcataatctccggttacccagtatggaagggttttcttttcaaattgagcgggataataaaaatcatcagcggttctggccgtcggcagcaccgcaagtttttcaatcggaatgggggcgcctgttttttcacaataaccgtacgtattgttttcaaacttagacagggcaagaagaacatcctgaagttcttcttttatatgatagatcagagttgcttcttggtcgttcattgaaggttcaacagatgctgacatttgaaagcaagaatattcgaataatcttgattgaagttcttctttcatcatgagaagctccgtgtggattgcggtcagttgatcattcattcatcacaactcctgctcttgatgttatagctttattgttgccctcagagcgctatttgaagcccataagaattttcctgccgttctaatcgatgacattgctggcatgtaaaaaagcgcccggctgacaccgggcgctttctcatttattatttttgataatatttttcaacgatttccgcattgcgcagtgataatgtcggatatttcggattggctccgacatctttagaaattacgcgggaacgctcacacatctggccttccgctttttctacggtcatttttcctgttgtaaagctttgcgcgttttccggcgcttcactttcgtcttttactgtcagttctgagacgataaacagctgcgcgatgttttctttaatggatgacaagaggtcgcggttttctttgttcggatacaaagtaaggctcgcttccaatgatcttccgataattttttcgttacgggctgtttccaaagctttcagcacgtcgtttcgaagctccatgaagcggtcgaatttttcttctgtcgcctgactgtccggaacagcaatggtttccggcatatctgtcagctgcacgctcgcttcttcaacaaatgataagtgagaccacatttcatccgccgtatgcgggagaatcggcgccgtcagtttcactaacgccagcagcgtttcataaaagacggtctgcatgctgcggcggtccggatgatccgcatgctcgatgtacacaacatcttttgcaaaatcaagatagaaggagctgagctcgatcgtacagaaattgtgaatgctgtgataaacaaccgcaaattcgtattcatcgtacgcttttttcaccttatcgatcagcttattcagcttgatcagcatatattgatccacttcgcggagatcttttacatccacggcattgatgcttggatcaaaatcgaacaggttgccgtgaaggaagcggaacgtgttgcggactttccggtatacttccgcgacctgcttcagaatatcttcagaaaccgggtgatcggcctgatagtttacggaagatacccataaacgcagaatttcagctccaagctgttttgcgatttttgtcgggtcaatcgtattgccgagtgatttactcattttacggccgtttgcatcaagtgtaaatccgtggcttaatacgcctttatacggcgctttgccggtgactgcaacagcggtggaaagagatgagttaaaccagccgcggtattggtcagagccttcaaggtataaatcagccggacggacaagatcatctcgttcttcaagaacggcctgatgggaagaacctgaatcaaaccatacatccataatgtcttgctctttcgtgaagattccgttcgggcttcccggatgtgtaaatccttccggcaggaggtcttttgcctctctttcaaaccatacgtttgagccgtgctgtttgaacagctcagacacgtgttcaatcgtttcgtcagtgatgatcggctcaccgttttctgcataaaataccgggatcggaacaccccagacgcgctgtcttgagatacaccagtcaccgcggtcgcgcaccatgttgtaaaggcgctgttcgccccactccggcacccacttcgtttgtttgatggcatcaagcagatcggatctgaaatctttaattgacgcaaaccattgcgcagtcgctctgaagatcgtcggttttttcgttctccagtcatgcggataggagtgtgtaataaactcgagtttcaaaagcgcgccgttttcttcaagcttctccgtgatcggtttattggctttatcgtaaaacattccttcaaagcccggcgcttcgtcggtcatgtttcctttttcatcaacagggcacagtacttctaagccgtacttttggccgacgataaagtcatcttccccgtggcccggggcagtatgaacacagcctgttccggcatcggttgtgacgtggtcaccgagcatgacgagtgaatctctgccgtacagcggatgttctgcagtgatgtattctaattctctgcctttatatgatgcgacaacttcaggattttcaaagccgcatgcctccgctacgttttcgatcagttcagccgccactacataacgcttgtctccaaccttgatgacattgtattcaagatcaggatgaacggaaattccgaggttggcaggcatcgtccacggcgtcgtcgtccagatgatgaagctttctccgttttccagaacgcctttaccgtctttcactttaaacgcaacataaatagacgcggaacgtttgtcctgatattcaatttccgcttctgctaaggcagattcacttgaaggcgaccagttgaccggcttcagacctttataaatatagcctcttttcgccatctcgccgaaaacgcggatctgctgcgcttcaaattcaggctgaagcgtaacatacgggttttcccaatcgcctctgacgccgagacgcttgaattgttcgcgctgtctttcgatctgctgccatgcataatcttcgcaaagcttgcggaaatcagcgacggacatttctttccggtttacttttttgtttttcgtcagcgccgtttcaatcggcagtccgtgcgtatcccagcccggcacgtacggtgcgttgtagccgctcattgatttatagcggacgatgaagtctttcaggattttgttcagggcatggcccatgtggatgtctccgtttgcataaggaggtccgtcatgcagcacgaatttcgggcggtctttcgtccgttcttgaacaagacggtaaatgtcctgctcctcccagtctttttgcatgtccggctcacgattcggcagatttccccgcatcggaaaatctgttttcggcattaacagcgtatctttgtaatccattttcattcctccacaacatttttcagaaaataaaaaaagccctctcatcccataagggacgagaaagcttatctcgcggtaccacccttttagaaaaaacggatcatccgtcttttcctctcgaacatcgtaacgtgatggaacgtcctttcctactctcggttcagaaaggaaactaaagggctgatctgcatgattccggccatcccgggctttcaccttccccggttcgctttatagcctgttttgagtcatgccggtccctttcaatcgtcttttcatctgaatttatgaacgtattatattcgaacgggccgaagaatgtcaagaaaatcagaaaattattctttttcctcaaataccgcgtcgacttcgtattccagcagatgatcccaatcatcgttcttcagcaggtcgagctgcgcttcaatcagcatttggaaacgtgttctgaagactttagactgttttttcagctcttcgatttccattgcgatttttcttgatttggaaagcgactcattgatgatgcgatcggcatttttttctgcttcacggacgatcagcttcgcttctttctgcgagttgcgctttacgtcttctgcggcttcctgggctacgagaattgatttattcagcgtttcttcgatattggcaaagtggccgattttttcgtccagctcgttcactttcgcctcaagctccgtttttttacggagtgcgatttcgtaatcttttctgacctgcattaaaaattcatttacttcatcttcatcatatccgcgaaaaccttttgtaaacgttttgttatggatatcattcggcgttaatggcatattgccacctccatttttacatttcagtacggttatctagttcacattataaaacaaatacggcacagatggagaaaaaaactgaaaaaacgactcatttttgccgttcaaatgtaactttccatttgtcttttttcgtttttccgtcaacttttgccaaactgcatcgtccgaagccgcgaatcgagagcatgtccccttcagcaacctgataagacggatcttcaatagctttccaattcaccttaacgagcccgtttttcacaagcgcctgcgctttctgccgggattgcctgctcattgaagcgcagacggcgtcgagacgcaatgaagaaaccgtgtcatcccttatttcgacatctgaagcgggaatgtgaagagcggaaagctcgattttctcaagctttaccggcgctttgcccgccttggtcagctgagtgctgacaaaatcggcgatttcaccggagacgatgagctgcacggcttcctctgagaaaatcagatcgccgtatttctgccgctttaagccgatccccattaatgatccgagaagagagcggtggtcaatgctgacgaatttttcagcgtattgaacgtcaaaagcccggagctcaaaatcatcctgttcaggttccatatattcagggtataaaatcgcgcgtttgcgctcagctctgtcatatcctccgaaaaacgcaagaccgcaggcgtcgccgataacggcttttacaatcacctgttccctgggatctaagaaatcagtcagcttcatccgatactggtccaggacaatctgtttccattcaagcacctgatcaataaaaggccgctcgtcttgtctgaagtgctggtaaatatcgctcatgttctttcctttctatgtaaagaggcttggctggtgccaagcccgtatcaaactgtcgcattcaagtatacattgcgatcatgcggtataggccccaaagtcccgtcgtggcaaaccgaagcacgataatcgctacaatcggggatatatccagcatggcaatgggcggaatgatccttctgaacggctctaaatacggttcgcaaatcgctgcgagaaaccgtccgaccgccgtttctctcgtactcggcacccatgacataaagatatagatgatcagggcaaacgagtagatgtaaattaaataactcagaacggaaaaaatttgataaagaatcatcctgctttaccacctctgatgttcgtcttcatttataagctccgaaatcgtgccggaaacgtcgacattatcaggcgtgcacagaaaaatatctgaaccgattctctgaatgtcgccgccgatggcgtagacggtaccgcttaaaaagtcgacgattcttttcgcctgatcatgctggatgcgctgcagattgacgacaaccgcccgcctgttctttaaatgatcggcgatttcctgcgcttccgcatatacacgcggttcactcaagaccactttagaggatttctgaacactttgcaagcttactacgttctgcttgccctgcggcttctgagcgtaagcaggctgtttatctttctgctgttcatgctcttcctgatgatcctgctccgtttcaatgtattcgtactcgtactcctcctcatccattgagaaaaagtttttcagtttatttttcatgctcatttgtttacaccccccggttcatttccgactaatgaagagccgattctgataaaagttgcgccctcttcaacagcgatttcataatcatttgacatgcccattgacagttcccggcacggcgcgtttgtctgattcagtttttgcacctgatccctcagatcacgcaattgccggaagcaggctctgatcgtttctgtatcgtctgtcaggggagccatcgtcatcaggccctctacagaaatgtttctaaactcagaaagctctctgataaaggggatgacctcctctgttttcaaaccgtgcttagacggctcaagcgaagtattcacctgcacaaaacagcgaaccgtatgctgcgcccgtttttcaatctcttttgccaatgacagtctgtctaaggaatgaatataagatacacggtcaacgacggccttcacctttctggactgaagactgccgataaagtgccacttcgggcttcctttgatgacttcctgcttatggataagctcggcatcccggttttctcccagacttgtaataccggcatcaacggcctcttgagccctttcagctgatacgtattttgtaaccgcgatgacggtaacatcttcggggcttcggcccgatctgttacatgcttcgtttattctttcgtttatatgtcgtaattgatcagcaacacgcaagatctaatgcctccttcattccgataaaggacatcatgcgtcccgttttccctttgtcgcggcggtgtgaaaagaatagttcatgctctcgttcggtgcataatccgctgactgaaatgttttcttccggaatgccgcaatgtatcagaagaagacggttgacctcttttaaatcaagctgatactggcctttttccgtttcgcatatggcggattcagccgtaaagggcagcgcccgcacttcattgatgacgcggtcgtcgactgtatagcttcccgcgctgatggacgaaccgatgacagcctgaatatctgttaaacgggagccttcttcgtttacccagcgttccgtcatgatgcgtccgatttgtttgaccgtccccttccatccggcatgggcagcgccgataatggatttcaccgggtcataaaaatacaagggcacacagtccgcaaaacaaagggccaaaaaaagattcgcatctttcgtgtagagcccgtccgtcccgcggaatgcggaagaatagtctctcgctccttttcctttatccccggctgtcacgcgccggacgcggttttcatgtgtctggtcggcgaacacccaggaatccagatcagtaccgcataaggacgctatgacttcacggtttgtcacaacatcatgagcttcgtcccggacgtgcaacccggtatttaatgactcatacggaggattgctgacaccgccgtttttcgttgtgaatccggcgatgacctttgtgttaagctgattcacacagttccagtcttctatcatgagtgccgagggggtggtaagactaaacgggtgatatgtattcatggagatccaacctttcgacaaacattaaaaaagcgtaatttcccactcattttaacacaattttaagcatacgtttagcggctgattgaaaaatgagataaataaatgtgccggaaacattgagatttccggctttttacaagtaaagggaggattacgctcccccctttggttcatttacacgcactaagatgacatcttccccaattttaactatatttcgccaaggaatgatcatttcctcttcttttccgaaaaaaccgagaacttttccgctgccgcctaaaataatcgcctgaatttttcccgttgtcacgttaatatcaatatccccgatgcttccgagtttttttccgttcgacacgtttaccacatcttttatttgaaattcagatatgctgatcatccgtatcacgccctttgcccgttctttttcctattatatgaacggccgggctgaaccttgtcacatcgggcaatcttttttgcggctgcaccagccgagaataaatctcagcatgattttcgtatagtccataagctcatcaacggacacttcctcgtttacggagtgggcgttttttaaatcgccggggccgtatatgacgctcggaatcccggcctgataaagccatcctccgtctgttacggtttgggaaacatcaatgacgggctcctgttttatgacggcagagtgtgatgcagccaagacagaaactgccggatgatccggatcgatttccagcgccgggaacacctctcctctgtcttcaatcatcgaagatccgccccatttgaacaccggcctgttttctttgagccacagatcactgtcagcgacacgattaatatagtcttcgatttctgcggctgcttgttcgtgcgtttcgttcggataaaagtggacggtgatccataaccggcattcatcggcgacaaacgctgcgtgtcttccgccttcaatgacggcggggttgatcgtattggtgccgggcgcaatgccgggatagcttttcgttaccgcccagtggcgctccagctctcccaaggcagtgatgattttcgccattttttcgatggcgctcgctccgaatgtgcctccgcccgcatgaatcatattgcgcctcatgccgtcatgaaatgtttgtttgcttttcaattctatccagccggtgatgacaccgccctgcccttgaatatgcaggctgctcgtatccgcgacaaccgcaaaatccgcgtgatagccgcgtttgcagcattccagcgtccccgcctcgccgacttcttctccgattacagactgtacaatgaggtcgcccggaagcttaattgcggcatcatggatcagcttcagagagaaaagaacacacgccaacccccctttcatatcagcggcgccccttccgatcagcatgccgtcttttacgagcggctgaaacgggtcagagttccaatcttcgcccccggcttctgccacatcaatgtgtccgtttaaaatcaggctttgatgcctgcttgaatctgtcccttttaaaacaccgactacattcggatcttccggatacacatcccacatatcgaccgagcagcccgtttcttttaaaaagccggccacccacttttgggcttctgccgtatttcttgctggcggggccggagtgggaaaggcgatcaacctttcagcaatatgtatgaagtcgtgcctccgtttctccgcctgttgtaacagcatatcaatctgatgcattggaaatctcccctttagctgtatcaaaaaacccgtttcattaaaatgaaacgggtaaaaaacggatcttcctccgcttttttcaccgcttccctccgccggcatgatccggatcaggtccgttaagggttgagacaacgtctctctcagccgcatggcagcacccccagggtgaattgatgttattttacggttgatgcctcttttgcacgtgttaaaaacgggcggccattgttccataagacattgacaggcgtatcgaaaaacgctgtaagccgctcgtcagaaagcatatccctgattttcccggaggcgaacacctcgccttgttttaaaagcagcgccttatcaaataccggcagaatttcttcagcgtgatgggtgacataaaggatggacggcgcattttctttttcggcgatcgacgtaatcgtgtccagcagctgctcccttgccataaaatcaagacccgtcacgggctcgtccaaaatcagcagtttgggatcagccataagcgcccgcgcaatcagcgctctttgtctttccccttgtgataatgtttcataccgcctgtcggcgtaactgatggcgcccaaatccttcagaagaccgatcgctttttcccttacctgctcactcggagtttcgtacagcccgattgaggcgtacgcgccgctgagggcgatttcaaaagcggagtccgcggcatataatttgtgctgaagacctgccgaaacaaggccgattttccttctgagcctgtcaccgagctctgttttgccgaactgatggccgagcacctgcatctctcctgaagtggggaagtaataagagcataacatattcagcaaagccgtttttccggctccgtttaatccgtacagcacccaattttcgtttttctcgacgcgccagttaatatctttcaaaatccatttcccgtttctttttaatgacacactgtccagctgtaaaatcattgccgtttcccccgtttactttatttaaattttctaaaaacttttacacattagaatacatcacttttttgcaaacgtaaaccatcgcatgaaaaaagcctttaaacaaggtttaaaggctttttccgttattgatggatattcttattcatttgtttaatggctgccttttcaagccttgagacctgagcttgggatatcccgatttcttcagcgacctccatttgggttttcccttggaaaaagcgctttcgcaaaatcattttttcccgttcgttcagtcttctcatgccttctttcagagccagctcctcaatccattgtgtatccttgttgcgctcatcgctgatctggtccatcacgtagatcggatcgccgccgtcattataaatcggctcaaacagtgaaaccggatcctggatggcgtcaagggcaaacacaatttcttcatggggcacttcaagaactttggcgatttcctctgctgtcggctccctgcttgtctcactgattaaccgctctcttacttgaagcgctttatatgcgatatcgcgaagcgacctcgagacgcggatcggattgttatcccgcaaatatctgcggatttctccgatgatcatcggtacagcgtatgttgaaaacttaacattatggcttaggtcaaaattatcaatggatttcattagtccgatgcagccgacctgaaataagtcatcaacatactctcctctgttgttaaacctctgaatgacgcttaagacaaggcgcagattgccgtttacaagcttttccctcgctgaatcatcgccctcatcctgcaattgcctaaacagctttctcatctcttcattcttgagcaccggtaatttggaggtatccaccccgcaaatttcgactttatttcttgacacgtttttccctcccactaggagctgctgtacaacgttaagtatctcctcgggtgggaaaaatatgcaccgctattttacagaaataaacatccggcggcggcaatccttgcagcagtaagggctgtcagatggaaaaaattttacaccattttgttaaactcttttctcagtcttttgataatccgcttttcgagccgggagatataagattgtgaaatccccatcatgtcggctacatctttttgggttttttcttcttctccgacaagcccgaaacgcagttccataatctgcttttctctttcgtttaattgctcaagcgcttttttcaaaagttttttatccacattggcttcaatgtctttcgtaataatatcatcatctgtgccgagcacatccgaaagcagcagttcgtttccgtcccaatcaatgttcagcggttcatcaaaggacacctctgaacggattttattgtttcggcgcaagtacattaaaatttcgttttcaatacatcgcgatgcgtaggtggcgagtttgattttcttttccggattaaacgtgtttaccgctttgatcaaaccgatggtgccgatgctgattaagtcctcgatattgatgccggtgttttcgaatttgcgggcaatgtaaacgacaagacgtaagtttctctcaatcaggatggcccgcgccgcctgatccccgctcggcagctttaataagagcacctgctcctcttctttagacaaaggcggcggcagcgcctcgcttcctcctatgtaatacacttcatcgcttttcagtccgagtttcatcagccatttataccacaaatatgtcagacgcagcttaagttttttcatcttcctcccccttctaaataccacgcgttttgagtatgatgaataacagacttttcgtcaggaaacatgttttacagccttccctgtcagcatcttcggatgaacgattccgtcaaattcaccgtcagcggataatggcttcgtgctgatgccgatcaggcatttttcacatgcgatcatctcgtcttttgttaaaatcgtgacgtaatccggctttaaacagagtaaaaattgattgtcctggccgacgcccctgtatggaatcagcctcagcttatccgcatggcggaacgaatcatcaagctgctctatcacttcaagcggactggcggatttgatgaagtccgtttccttttcgctgaggatcggagcgaatttgttaatgtgaaggatcatgaccggcgttttcgtcagcggatcatacagctgattcccggaatccaccaatcctttcgcgcggattgtctgtccgctgaattccgcctgcaccatgacaagttcatcgtactgaatggacttcgtctcgatgtcttcaattctctttttcgaaaaaaaccatatggccggaaatccgataactacaaacatccagctgatcgggtcgccgaatccggtctggcttgtaaccattacgccttgctgcacaattgattctgtctgcagcagggaatgtacgccgatcattcccccgccgacgagaaaagtcgcgaaataaaaggcgaacaaattttgaaaaaagtatcggaaccgtttaaagccaaaagccgtaagcacgatgactaccgaaaacgccatttttcccgccggatgctccacaaagggagaaataggcgtaaacatcagaagcacaatggctgacccgatgaaaccgccggcggccactcttctttttttcacctggcgttttaaaataaaggcggtcaataaaagcaaaagagaatcaaaacaaaagttcaacagccaaatgacatccagatagattttcacatctgacccctttcctcttttgtcttacatatctgtttctctctcttgtttcataagtataaagcaagctctgtgggaaagtctgtcaattaatgttgagggtaaagtacaatttttaagggataaccgttttatttgtcgagggccgaaaaggttgattttctattgtccccttcaactaaaaaagcgctgccgtgatttggcagcgctctgtttttactcattgatataaagttttcctttagccgtctgtctcgtttcatttccgtagtcatctcttgcgataacgtcaatttttgctccgcttgctttgatggaagaagccgccgtccagtaaccctcatatcgtcccggagaaatttctctcagcggaagctctgttgcgttttggctccctgcccgggcgtttgtcagaggcagacggatcacgaaggaagcgtctaatttctttccgcttgaaaaagcgattttcactgattctccggcttttaattccttatccgctccgggaaccaatccggaaatgacgggagcattgtaattgacatcgattaccgtctttttcgttgttttgttaccagcttcatctgaggccgtgaccttgatctcattgctgccgttttccagaagggttctcgcttgataagaaccgttatttacttcagctttttttccgttcacctttacccattttaaatgggcgtcgtgcacttttccttttacagtcactgcttctttatttgttttatcaccgtttgccggactgtcaatcgtcacatcaggcttatcctcatccagtatgaccgtgacagggcgtgactcgtcggttgacccgctgtctgtcacagatgccgctgtcagccgattgccatctttagtgagtgtgacaccggcctggaaactgccgtctgcatctgctttcgtttctgcggcggttttaccgttattggtaagacggacagcggtttttggtgaagccgttcctttcaccgtgattgacttcttgtttgtaaatgaccggttttcaggcgacgttatctcaggcacagaagcttcgtagtcgaccaaagccctgatcataaagtttccgtctgttttatcggcttttgaccagcggccgtcgaggtattgccagtttctgttcgagtacgggctgccgtcatcagatgacagggcaggtgtataaggatcgggtttcgtctgacggaacacaagataaaaatcctttccgaccgcgattccttttgagctgagatccactttggtccactcgccgtttcgaagcgcttcagcttggaacgggccggcaattttgctgcccggagctccatcagggccggatgcatcatatacttctgcttgaaattcggtaccgcccggatcaggccagtcggcgccccaaaatttaaaaaggcctcccgtcagcataccgtgttcttttccgtctttgagggtcatcttaacggcagatttgctgccggctttaaaatatgacagcgcggcttcttccgtcccgttatcataggcgatttccccttcataaccgacatacggcttaagcttgacgtttttttcagcatctcctttgatgtcgacagaaaattcgctattgtaaaagccttttgccgctactttgattgtgtaggagccttcatacgccttaagcgaatattcccctttatcgtttgtcaccgccggctcaattgcggcatcctcggccacataaagcgcagccccttttaccggttcgcctgtggactgattggtgatggttccttttagcgtgccggacggcatttgctccagtgtaaagtctgcctgtgcggttttgtctgattgaatagaaacttgtttcgaagcggacttaaatccgtaagcctcggctttcagcgtatagcttcccgccttatgtgacaggctgtaacttccgcttgcagggtcggaatatacggatttccccgtctcggcgacactgatttgcgctctgagcggcaggaggtttgtttcacgtttcactctttttccgggtgatttcactgccggtttggcctgtttcggactgatggcttttttcttcaggtggccgggaggtgtttgtctattgtgtttactttttttagccgccttgccgagagggctgcttgaaagccggatatcatcgatataccatccgtcttcattgagtacttcgtcagactgcatattaaacatgagctttatgttttggcctttatacgcagataaatccgcctcttcatcattccatcctgcggaatcaccattgtaaacggccgcctgctcccaatttgatttcccttccggcagaacgaacacatacccgtaatcaaaaaattcttcgagcttgtgccagcttttaaattgtaaaaacagccgccctgtttccggaacttgaatcggaggcatcacgagattcatgttggccgaatcggcataagggccggacagattcgtcgcatacactttatctccggaaaatgcggcgccgggccctgaacccgggataccccattcccattgatcatgtgtcccgtaactggaccagcccgccggctgtgattcaaaatcctctttgtatcccgccgtaatgctcggtttcacgtcagcccggtacgtatcagattctacagaatgacctccgaaatcttttatggtccatttataacttatcttgcttcccgttatgtccggaatctccgcctggtatgttccctttttttcatcaccgcttttttgaacggcggctgtcgttttccactctccttcatcaaactgataggagaggatcacctcagttatgcttacatcatcttctgctgtaaccgttaacggaaggtttgcccctttgtaagcctctgagaccggttcatgatgaaagctgggcggattgtgatcttcacccgcagaagataccttgccttctacgcttccgattccgtccgttacggcagaaacggcatcaaaagcgttaacgaggccgtggccgtaaccgttattcggtgattccggaaaaacggaatctgtcagcttttcggcggtgcgcgtcagaacgtcttccatttcatcgaccgtaatagaggcgttcgcctgccttaacaaagccgccgtcgccgccacatgcggcccggccattgaagttccgtcccagccgccttcgtatgttcctccaggaatagaagaacggatattcacgcccggagccgaaatgtccggttttgtttcatgatacggtgaggggccttgaagtgagaaatcagcgagtttcttgtcgatgtcagtcgcacctgtcgcaaatgcttcaggataattggccggatttgcgattgaacccggtcctcccggtgtaaataagtcttcatttcccgcagagaattccggaaaaatccctgccgctctccacgcattcaccatatcgcggtaccactcgtccattcccgaaccgcccgcccaggaattattgacaacatccggcgccatctcgggatgcggcgtgccgtttttatctttaggcgcaagcacccattcaccggcatccaaaatatcggcatcggttcctccgtcatctgaaaatgcttttactgcgatccatttcgcccccggagccacaccgatttgatttgagccgtcaggttctgaacccgtcatggtccctgttacatgagtgccgtgttcaagatcgtcgtagggagcgtctttatgggacacggcatcataccagttcatttcatgattcggcgctgctggattttcaggatcgtaaccccggtatttttccttaagcgcgggatgatcccactgaactcccgtatcaatggaggcgacaaccgtgccggttccgtcgtatcctgaggcccaggcctgcggcgcatcaatttggctgatattccattcgatgccttcctttgctttgacctctttttgttttttcttcatttgaaaaggagcttttgattgccgttgagtaagctgacgtttttcattcggaagaactttttctacttcaggaaatgaggcggctttttccattacctctttcgaagcagtaactgccattccgttgacaatataataggaatggatgtgatcagcctttcctttctttttttgtttttccaaatatgttttcagattctgctgcgcatcatgagctgccagttttaaagaagaaacaacggctgaccgcttttgatattcggtttttgctgcggaaagcgaatgagactcggcatttttttctgcttctttgaccgcttttttcgtattggctttctctttaaatttgataagaaacgtgactttatcatttttttcaaaacgcttcttgactgaatcggaaatcttatgctgaatgctcttagaggaagaaagatctttggtaaaagaaactgcccccggtgtgctgttcgctccgactgcccccggaaacaacagtgaactgacgacaatcgcgcttaaaacggagcctgtccatctgtttctcgtttttttcttcaatcgtatccccccttatttggtaacgccctataaaatgtgtatccctccttcataattggaatcgtttgtcatttcgatgctgtacgttaaatgtagacaatcttccatccagatattgtcacattctgtagaaagccgtatgaaacttaaaaacaatcaattcgtcataggtataaagcttcttttttcactgtatagatcatgggggataggaaggaagactgtgcacaaaaaagaaaaaggacaaaaccatgtggtcttgtccttttttacatcagccgcgtttgttgcggtttcttaaaaatgtaggaatgtcgagggcatcatccgccggttgtgatgtatggcggttcaccgtgttttgatgctgtgtttcttctcgtttcggctcacgtttcgcagcattttggctttgagacttcaatccttggtttaaagtcggacgctgcggttttgagtcatctttttcctgttcgataaaaccggtcgcaataacggtgacgacgatttcatcttttagattttcattgataactgaaccgaaaatcatattgacatcagggtcagatgcagaagcgacgatgtcggctgcttcctgcacttcgtagaggctcaggtttgtacctcccgtaatgttcatcaaaacaccttgcgctccgtcgattgccgcttccagtaacggactggagatcgcctttttggcggcttcagcagcacggctttctcctgtagcgatcccgatacccatcaatgctgaacctttgttggacatgatggttttgacatcggcaaagtccaagttgattaaaccaggcgttgcgatgaggtcagagataccttgcaccccttggcgaagcacgttatcagcttcacggaatgcttcaagcatcggtgtgtttttatcgacaatttcaagaatgcggtcattcggaataacgatcagtgtgtcaacggcttctttcattgccgtgataccgcctgcagcctgcagctggcgttttcttccttcaaatgtaaacggtcttgttacgacaccgacagtcaaagcgcctaagtcctttgcgatttgcgcgatcaccggtgcggctcccgttccggtaccgcctcccattccggctgtaacgaacaccatgtcagcgccttttaacgcttcttcgatttgttccttactttcttcagcggcttttttgccgacttcgggattcgctcccgctccgagaccgcgggtcagcttttccccgatctgcattttcacttccgcttttgacaggttaagagcttgcgcgtccgtgtttaccgcaatgtactctacaccctgcacttcattttcaatcattcggttgaccgcgttattaccgccgcctcctactccgattactttaattgatgctaagccgtctatgtttgtttcgaaatccaacatgctaaatcctcctaatctgccgaatgactatcaatctattcccaaaacatgcttaatagttttttcattttgctcggtttgttgtgttcggcttgtgttttttgttttgcttttggacgctgctgcgcctctggccgctgatgatgttcttcttcgtgagagaccgcgatttcctgcacggcttcttccggcatatgaaagcctatttttcttccctgaattctggcatttcggcaggcaaattgtatcaagccgacacccgtcatatactgagggtctcttacaccgatataattcgggcttgcgacccttacattgtgcctcagcacttcctgtgccaatgaaagcactccgggcattgcggcctgtccgccggtcagcacaaagccgccgggcagatctgtaattcccatatgctcaatttcggctgcggcaatctcaagaatctcttccactcttgcttcaataatattggcaatttcctgctgtgtaaaagattgcttttgattcgttcctatgacggtgacttcaaatacttcatcttctgaagcctcatcgtagaatgcatgtccgaattgtttttttactctttcagcctcttcggtggaagtgcgcaatccgatcgatacatctttcgtgatgttttcgcctccgagcggaatgacggctgtctccttcaggtgcccctgttcaaataccgccaccgtcgtcgagccgccgccgatatcaatcatggcgactccgaggtttttttcgtcttttgacaaagccgccgaaccggccgcaagcggctgcaggcagatatcagtaatttcaacgcccgctctctccacacagcgaagtaaattatgtaagatcgttttggagccggtaatcagcgtgccttctacttccaggcgcactccgagcatttttttcggatcggtaatttcgtctcttccgtcaacgataaactgtttcggaacgacgtcaacgatcagctgctcatgcggaaccgacacaacctgtgccgcttccattaccctgcggacgtcttcaacgtgaatttctttgttttcactggaaacagcgacaacgccgttcgtatcttgaatatgaatataatttccattaacgccgacaatggcttttttcagcggaaaacctaccattctttcagcttggtcaaacgcttttcttatagaatgaacggtttcatctatatcaacgattgagccttttttcaacccttcagacggtacatttcccactccgataatgttaagggaatcatctgtcatttctccgacgatcacttttgtattggacgtaccgatgtcaagactgacgtaaagttcattgttgttcattctatggcacctcctcacatttcgatcaaattctattctattatttgcggaacaacaatacaatgaatgtggctttacaagtgtgtaacaaaaacaacagcatcaacaaattcttatctgatttctcacaatttatgtttaatgaaactattcgttatattctatgtatatcctcttttatatcgcattttttttattttttttagagacggcccaccttaccgtaagatttcctgtcacggtgccataatgtgcaaaccagatgcaaatatacccgctttccattagtctacactaagatgaacctccagaaaagctatagatattgccagaaacatccgaaaaaagaagaaacaggaggaaaattccaaatgcaatgttcattgaagaagacacgcccattgcattgagaattttccccttgtccggcagccatatcccgggcaaaaacaaacatagtcataattattccgctatcggttatatcggctgccccgctgattgtaatagattcttttgaatcaccttaaaattagttctttagaactattaatcattttcttttttcttgccggatttacctttgttaaattcttcaaaatacgtagcgacttctaagtggataatcccctttttcccgccgtccagctgggaaacgatagaaggataggtcttcatccggtcggcaaatgttttaatagaagcggtaactacatacccgtcgttcatatacagcttgatccggtcctggtccatttttaccggtgtataatagatttcagaaatcgactgctttagcgaaccggaaagcttatcaagctgctccgccattttgacccgctttttcgcgtttgtccagtcaaccaaaatcgggcccgcgtcatccggcgtgacttcgttcggcagcacggtgccgttctccagcacttcataatacacatcattccgctgcagatacgcgatcgtcttgtattcttcaatgtgaatgctgactttattaggaaatacttttgaaagatccgcctttttcaccagtttattctgctcaatcttttcttctgtttttttcttgttcagactccagaactcggtttgtccgttatgtatatcagaaagcgcgttgatctcttttacagacacgttttcgttcccggaaacggtgacagaagacactttgctgatcggcatctgcaagtacacgatgatcagcaccatcataaaaaagagcacaatgaatgaaatcagccggcggtttgctttttgtttccgctgctctttgattttcggaatccgctcttcaatatttacgattttttctctttcatgatttgggttcactgcctgtccacctcactaagaatgaaacagcttgacattcgtctgattgaaaaacaaacggcatgctgtgatgccgtttgacatttgttaaaagtatatcacatgagctcatggaaatcagagaaccttttaacgattccctccgatgatttcaacttccgtatgcatgtcaacatcatactgctcacggattgtctttttcacatactcaatcaggtcgagaacgtccttggcagtcgctccgccggcattgacgataaaattcccgtgcatttcggatactttcgctccgccgatctgatgtccttttaatcccgctttttcaacgaggtttccggcatgattcggcagcggatttctgaatatgcttccggcgcatgggcttgaatacggctgcgtattttttctgtaatctttgttctgctgcatttgcgccgtaatggcttcccgttccttttgctcaagctgaagaactgcctcgagacagacgccggggcgttttttctgcaaaacagacgttctgtagctgaaatccatctcttcgtttgtcagccattcgattgtgccgtcttcaaataagatacgcgctttcacaagaatttcactcatatcagatccgtgcgccccggcattcatatagacggccccgccgattgatccggggatgcccgctgcaaattcgagaccggacattccttttttactcatggaagtcgcaagccggacgaccgaatagccgcctccgaccgtcacctgatcaccgtcaatctccaaatgatccagacccgcgcccagtttgatgacaactcctcttatgccttcatcaagcacgagcagatttgaaccccggccgataaccgtccatggcagatcatgtttcttcacaatatccataatatctttgaccgcttccacactgttggggatgatcaaaatgtccgccgggccgccgattttcatcgttgtatggttcgcgagcggttcttgttccagcactttgccgacttcgcggtctcttaattcctgaattacgttctccatcataaacctccgcattccatttgctctatttttttatgtcttccatgatactgtacagtctggctgccgcatccggaacaccgagtgattttgtccgctcactcatgtcttttaaggtttcttcattcatgacgattttgtccagcgcagcgatcagtttttctccgctgagctcggtttccttcagtacgattgcagcgtcatgctggctgagcgccttcgcattgacttcctggtgattggctgtcacatacgggctcggaataagcacgctcggaatgccgagagcggtgatctccgcaatcgtcgtcgctccggctcttgccacaatgacatcaattgattgtaagtactccggcatttggtgcaaaaacggttttgtcaccatattatcagcggcttttccgcctttcagctcagccgttaccttctcgtaatgcacttccccggtaatataaagcacttggtaaggtctcgttttcaattcttcctgcatatctatcacggcacggttaatgggagccgcgcctctgcttccgccgaaaatgagcaccgttttttgattgtctttcagcccgaactcagttaatgagcggcctgtcttaattgagacgacttcagaggctctcgggtttcccgtaaacacaactttttcagcaggaaaatgcgattttgcttcttcaaagcaaattgccaccttattaacatatttcgagagaaacttatttgtgatgccgggcaggctgttttgctcatgaatgatcgtcggaattcccatttttgccgccgcgtatacgaccggaccgcatacatagccgcctgtaccgataacggcatccggtttaaactcttttaaatatgatttgcttttcttcacgccttttaagaaacgcatgacggtttttacattttcaaaagaaagttttcgtttgaaacctgtaatttcaatggcgcggaacgggatattttcccgttcaacaatttttttctccagaccgttctctgttccgatatacaaaaattccacatccggatgccggcgctgaacttctttaataaaggccagggccggataaatatgtcctccggttccgcctccgcttactgcaatacgcattcgtatgtcccccttaatcacatagcgataaccctgttttttaggacagggttattgatgttgtctgtttttttatagataacgaatagatcatgagtgatgaggcaagatacagatcaatacctcgagtaccggctgacatttaaaagcacgccgaccgctgcgagcatcagcgtcagtgatgagcctccgtagcttaaaaacggcagcgtaattcctgttaccgggatcagccccgtcacaacgccgatattaatcatgacttgaatagctatcatagaaataataccgatggcgacaaagcttccgtataaatccggcgcgccgagggcaatcctgacgccccgccacaataaaatactgaacagcagcaatatgagcgaaccgccgataaagccgagttcctcagataaaatagcaaaaatgaaatcggtttgcggctccggcaggtaaaaaaacttttgccggctttggccgagccccatcccgaacagtccccccggacctacggcatagagcgactgaatgatctgaaatccgcttccaagcgggtcctcccacgggtttaagtaagaggtaatccgtttaatccgataaggagcggacagaacaagcgccgcaaatccgcttaaaccgatgagtccgaggaacgcaaaatgagcgattcgcgcaccggatacaaaaatcatcacgatgcacgtgcccaccattaccgtccccgttcccaggtccggctggcacataataataataaatgcagaaaacacgattccgagcgcgggaacgaatccgcgtctgaatgacgtaatattcttctgtttttcagaaagaaatttagccagaaacgcaatcatcgcgagtttcataaactccgaaggctgaatgctgaacgctcccactccgatccagcttcttgaaccgttccgcaccattccgactcccggaatcagcacaagcacaagcagaaaaaaacaaatgatcagaagcagcttcgaccatgtgcgccatgtccaataatccacattcataatgaaaaacatggcaatgacgccgatccccgcaaacagcagctgccgtttcgcgaagaaaaacgagtcgtcaaatttataatccgcccataccgcacttgcactgtagaccataattaatcctattgttaaaagcaataacgtaatgataactaataacaaatcaggcgctgtttttttagtagtcaaagcaatcgacaccccaagcataagtcatttagggctgccgatgaacagagacaagcccttacttaagcatatgcacggcatctataaacatgtcaccgcgttcttcaaatgttttgaactgatcccagcttgcacacgcgggtgacaagaggatgacgtctccttcatttgagagcgcaaacgccgcagatactgcttgttcaacattatcgacacgtttgacatgttgtattcccagctcattgcccagtttttctatcttcggcgctgtctgtccgaacgtcaggaccgctttgacattgtccatatacggtttcagatcgtcaaaaccgttgccgcggtccagtccgcctgcaagcagaataaccggtgctttgaacgcggagagcgctttgcttgtggccaaaatattcgtcgctttgctgtcattataaaatttacgattccggattgctgttacatactgcagacggtgtttgacaccggtaaagcttgtcagcaccttctgaatcgctttattagacgcgcccgccgtttttgccgcggctacagcggccaatatattttctaaattgtgcgcgcccggcagcacgatgtcatcaacaggcagaatcgcttcatcgccgaacatcagcattccgtctttaataaatgcgccgcttgacagttcctggtgcactgaaaacggaacggtgccggcttttccgctttcggcaagccgcacgactgtttcatcgctttgattcacgatggccgtatcactctcaagctgatgaagatacacgttctgcttggctttttcatagttttcacggctgtgatggtaatccaaatgagcgtcgaacacatttaaaatcaggccgatttcaggtctgaacgcatgagtccccataagctggaacgaagaaagctctgtgacgatccattcatcaccgtcagcatgataagccacttcactggcgacagtgccgatatttcctgcgatcagcgcctttatcgagtcagctttcagcatttcataaatcagggtcgtcgttgttgttttcccgtttgaacctgtaatgccgatgaattttgcattggtgatataatacgcaagctcgatttccgtccaaaccgggatgcctcttctttgcgcttcctccaccatgatattttcatacgggattccgggatttttgatcagaatggtaatgtgatgctgatcaaaaagtgacgtcggatgctcaccgcagatgacctcgattcctctttctgaaagcctttgggcaggttcgttctcttcaaaggctttttgatcattcacgacgacgttaatgcctttttcatgaagaatcgacgcagccgcatatccgcttttcgccagtccgaggaccagaaagttttgttttcgcaaaaaaagttcgttttccacttataaccacacctcgatgtaaattcctaaaacggcaagcagcagtcccgcagtccagaatgtgacgacaactctccattcagaccatccgaccaattcgtaatggtggtgaagcggactcatcttaaagattcgttttcctgtcgttttaaagctgatgacttgtaagataacagataaggtctcaataacaaaaactccgccgataatgacgagcagaatttcaagcttcgtcagaatggcaacggtcacgatcgctcctccgagcgcaagcgaaccggtatcccccataaatactttggcgggatgggcgttgaatacaagaaaaccgagaacggcgccgacaacggcaaccgagaaaatcgcaacgtcatattgtgactggttccacgcaaggatggcgaaagcgccgaatgcgatagccgcggtaccggacaagagaccgtccagaccgtctgtcaggttgacggcatttgaacctccgacaagcataaagagaacgaggataaagtatccccagccgagatcgattgacagatgtgtgcccggcaccctgatgccggttgaaaaatggcaataatgatatactccgtaaaatacaatggcaataatgatctggccgatcaatttctgcttcgacgtcaatccgagattccgtttcattactactttaatatagtcatccagaaagccgagcaggccgtatccgatcgtaacaaacagcagaagaaacatttccgcgctcagatgcgaaaatttctgcgtcatgacaatcgccgtaatagcgatggatacgataatcatgaccccgcccatcgtcggcgtccctgattttttcatatgtgatttcggcccctcttccctgatactttggccgaattttaaacgtcttaaaaacgggataagaatcggagatatcagaacactgattaaaaatcccattattattgtaaataaaatcacttgctcaagcattgctcttttctcctcccgtttcgttcaaacgacatacgtatttatcatattcacattgtgtccccgtaattcttttcatttcactcattctaacactctttcctgttttactttttattcagctcaacaatagctcttcccgctacttcggcgtcatcaaagtcgaatgtttcattgccgatctgctgataggtttcatgccctttcccggcaatcagaaccacatctccctttttcgcgttggcaatagcaaaaaagatagcctgctcgcggtttgcgatactgtgatagtaggtgccttctacccctctttccatatctcttaatatggccagcgggtcctcgcttctcgggttatctgaagtgaaaatcggttcgtcggcaatccgcaccgcaatttccgccattttcgggcgtttcgttttatcccggtctccgccgcagccgacgacgacgaaaagcttgccctctgtcatgtctttgcatgtattcagaacgttttccagactgtcaggcgtgtgcgcgtaatcgacgaccacaggaaacggctgattatgattcaccagttcaaaccggcctctgacaccttgcagctcttcaagagcgctcgtgatcgtatcaaacggcagacccgctgcgatcgctgtcgccgctgcagccagtacgttatacacgttgaagcggccgacgagtgaaaccgtgatctgctttgttccttttggcgtaacgagttcaaaatttgtgccttgcgcagagatctcgatttgtttcgccatgacatcggcatcgttctcgattccgtatgtaaggatgtgcgccgccgtcactttttcaaaataagcactggctttgtcatctgcgtttaaaacggcccgcttcggcttttcatggttaaaggagccgcccagctgggaaaacaggaggcttttagcctgtctgtagtcttccatcgtcttgtgatagtctaaatggtcctgcgtcaggttcgtgaatacggcgatatcataatcgcagccgtgaaccctgccgagtgacagagcgtgagaagacacttccataatagctgtgtcaacatgctcatcattcattttcttgaacgttttttgcagtgtgacgctttcgggcgttgtatttttgaccgggaatgtctcatccccgattttaatgtacatcgttccgattaaaccggtctgtcttcccgcttttttgaaaatctcatcaaccatgtgcgtcgttgatgttttgccgtttgtgccggtgatgccgataagctgaagctgctttgtcggctgcccgtaaaacgcgtcagaaagaacgctgagcgcccgctgtgaccggcggacgataatgacaggaacatcgacgtcaagctctttctcggcaacgatggccgctgcgccgttttctgcggctttttgggcgaaatcatgtccgtctaccgtatacccttttatacacacaaaaagactcccttttctcacttccctggagtccatctcaattgaagttatgtcagggtcatgaaagtcattttgaacaggttcggccattaaatatgtaagcagctttgtaagtttcattgtatcaaacctctcagaaattctattcattcttttatcatgataaccgtttataaaagtcagaatggcttttaaacatacagttcatattttagcgtaaataaaaggatacatccagttaatcttaaaagttatcttctttttttctctttatgataaaaggcagccgaaaacaatcggctgcctcaaaaagactcattcttcactcaagtaaacacggatctttgagccttcttttactttcgttccggctgcaggtgattgtttcacaattttgcttccttttcctgaggagtcaatattcaaattgacaagcagcgactcaagatcagagacagacatccctacaacattcggaacctctattgtttttgtgtcgttccattgatattttttctcgatttgattttttcgcggtttcacgccgagctccggcagactgtctctcatcatatttccgacaatcggcgcggcgacggttcccccgaattgaatcgtgcctttcggattatcaaccgcgacatacacgacgaggctcgggtcatcagccggcgcaaaaccgataaaggagacgatatggttgttttcgagatatttgccgtctttgaccttttgtgcggtacctgtttttccgccgacgcgatatccttccacgaaggcattccgccccgttccctgagcgacgacgctttctaaagcatatctgatctgctttgacgtttcctgggaaataacttgccttttcgcaatcggcgattgtttcttaactgtttttttcgtaacgggatcaacccactctttggcgataaacggagtataaagcgttccgccgtttattgctgcggaaacggctgccacctgctgaatcggcgtgacggaaaccccttgtccgaaagcggttgtcgcctgttcgaccgggccgactctgtcaagcgggaataaaatccccgttccttccccttgcagatcaatgcctgttttctttccaaagccgaagtccttaatatattgaaacagcttttgttttccgagccgttcccccagctgtacaaacccggggttgcaggaattttgaacgacttcaagataagattgcgaaccgtgaccgccctttttccagcatcggaggcgggcgccgtcaacctcggcaaatcctttgtcataaaagtggtctctttgcaagtttactttttgctcttggagagccgccgcaagcgtaataatcttaaaggtcgaacccggttcatatgtgctccataccggcaggttccggttgtaaacggacggatctacggattgatagtcagccggatcaaaatcaggacggcttgacataccgagcacttccccgtttttcggattcattgcgaccgcaatcattccgtccggattatatttcgccgctgcattatcgagctctctttctataatcgtctgaaccttggcgtcaatcgtcaatttcatatcaagtccgtctttcggaggggtgtaatcatccgcttcatcaggcattttcttccccttggcatccgtataaaatttcactgatccctttacaccttttaagtcatcatcataataagcctccaatccgagaaggccctggttatcaatacccgcaaaaccgagaacatgggacaaaaagcttccgtacggataatggcggatgctgtcttcagccacataaaccccttttaagtcgagcgctttgatttctttcgcttttttattggaaattttccgcccctcgggtgagattttttctatggaggttttcttagtaatgtgtttgtagaccttctcttccgacatatttaaaactgacgcgagaagcttgcccgtttttatgggattttgaatctggcgcggtacgacaaagacggtcggcgcgcttttattcgtagccagcttcacgccgtttcggtcaaggatttctccccgctcaggctcaaacggcaaattccggctccaggaatccttagccagtgaagtcagcttttctcccatcacaaattggacatagcctaatctgctgtcaatgatcaaaaaaatgattacgccaaaaagcaaaaccagtaataaacgttttcgaaccgttacatttgaaacgcgcaagggaccgtccactccttatttaggcttgtttcaatttatgcctcagcttggacacatagaacggcggcgcataaaaaagaagcccgcgggcatccgcggacttctctgtcccgttaatcaggatttttaaatttcaccttgatcacggtattttctttcagttctttgccttttttcacactttggcttgaagcgtaaccttcaccgctcacatcgatgtgaatgcctgatactttgctgaattgaagcacttcccgtctcgaccatccggacatatccggcatcgtcatctttccgtctgtttttaagaagattttctgattggtgatcacatcttctccggctgtcggatactgctcttttacggcaacatcgctgccgatgacaatcggtgtgagatgttcatttttcgcttccttctcagcgcccgtgactgtcttatctgtcaggtcaggcatcttttggcttttcgtttcttcctgaccggaatctgttttttccgtcggttcgatattcatgtagtggaggctgtttttcatcgtcgggttaaagatttccgcgacaggatcagagctgctttgacccgcttttaactgcggctgctgcacggctacatagatgacgagcttaggatcatttttcggcgccatgcccatgaatgaaaacacatagttgctcgttccccttaaatatccgcctgtcccggcgatttgtgcggttcccgttttacccgcgacgtcaaaaccttcaattttataaggttttcccgttccgatgtctgacgtcacgacttctccgagcaggttccggacttttttcgccgtatcggctgaaatcggcgtgccaacttgctccggttttgtctgcttgacgacttttttcgtatcggggtcgacaatatgatcaatgacgtaaggtttcatcattttgccgttattggcaatcgccgtgacggcctgaagctgctggatcggtgttatcgccgatgcttggccgtaagccgtagacgctttgtcaaaatcatatttgtagttaattttacttgatacttcaccgggcagatcaatccctgttttttgatagagcccgaatttgtgcaggtactcattaaaccggtcaaaccccagtttttcgttggccagtttggcgaaagcaacattcgatgacctcatgaggccgtcatggaagcttgtcataccccatccggcgccatcgttccaatctttaacaggtttgcctcccactttatatgttcctgatttatatttctcgtttgcggaaaacacattttcctgaatcgccgcggcaagcgtaaagatcttcatcgttgaacccggttcatacgcgtacgacactaagtcgttgtaataattggtgacgtttctgatattcgggtcaaaactcggacgctgccccatcgcaagcactttgcctgttttcggttctacgacagccgccataatttttttcggtttatatttttccgctactttcgtcatgctgtcttctagaaaggtttgaattttctgatcaatggttaaatatacattgtcaccgtttttaggtgcggtgattttttctttgctgttcggaagtttccagccggatttatcactttcgtaagtgacggacccgtcacgttccgtcagatagttattcagtattttttcaagtcctaaagagccttgtatctcgtttgttttttcattcacatcggcatagccgagaacatttgacaaaaatatgccgttcggatagtagcgcttcgtatctcttaagaaagaaatacccggaagatccattttttcgatcttttgttttttcgcataagagatatcgcggccggctgaaccgaattccacctgcttcgcgccattcctgtttaagatgtccagaatctcgcttttatcaagattgataacggtcgccagtttttccgccgttttctctttgtctttgacatgctgaggatgcttcggatcactcgtcatttttttatcaagcacggcaatgagcttatatgtcgccgtgtcctctgcaagcactttgccgttccggtcaagaatagagccgcggctcgcttctatcgtccgctttttttcgtgctgctcggtcgcttttgttgcaagttctactccgtttgctttaccggttaattgaatgtacgccattctcccgagaatgacaaagaaaaagagagcgaaacaaatactgagtatcgctgctcctctgttcataaacttattttttttcggcatgggttatcattcctgtatgtttttcacttttttatctttcagattcaaaccgtgctttttagcgatatccatcaggcgctgcggctggcttaagtcagcagccgtcttttcgagatcaccgatctgcttattcttctcagatactttctcctccagtttttgcacctcaatattggattggtacgccgcgtatgcctttgatacgataaacattgatgtggagagaacggcaatggcaaacaggacgagcagcaccttttccccgagtgtaatggaagccctctttttgacaatcacctttttttcgggacttatcactggccgttgttgtttttcctgctggtaagctaagttgctcataggctgatgacctcctttaatgttgtcatttgctgcccgttattttcgtttctccgcaatgcggagcttcgctgaccgggcgcggttattttcttcaagctcctcttttgatgccgtaatgggctttctcgtaatcagttttaattccggttcaaattcttccggtatcacgggaagacccggaggcagttcgggaagtgatgatttttccttgaatgtcgtcttgcacattctgtcttccagcgagtgaaaagtgatcacagacacccttccgcccggcttcagcacctctatcgcttgcaagagggcctcttcaaatacctgaagctcgtcgtttacggcaattcgaatggcttggaatacacgtttggccggatgacctccgcttcttctcgccggagccggtatcgcgtcctttattagatcgaccagttggccggttgtttgaataggcgatttttctcttgcctcttcaattttccgggcgatctgcttgctgaatttttcttctccgtatttaaagaaaatcctcacaaggtcctcataccgccattcatttacgacttctttcgccgtaagggcggccgactggtccatcctcatgtccagcggtgcgtcatgatgataactgaatccccgttccggtgtatcaagctgcggagaggatactcctaaatcaaataaaattccgtcgacactcgtaatgccgtgttcatgtaaacactcttttaaataacgaaagttgctttttaccagaatgagctgtcctttgtattcggacaatgttttctgtgcgttttcaagcgccgtgtcatcttggtcaaaggcgatcaggcgtcctttttccgataattgctgcaataaatatgtactgtgcccggcgccgccaagggtgcagtccacataggttccgtccggtttgatatttaaaccgtcgacggtttcacgaagaagtactgtcttatgctgaaacatttgtgtcggtcccacctttatcaggaatgaattgaattgtcagttgttgttgtgatgcacgaagatccattatatatcaaatccaatcatgttttcagcaatttcagcgaatgaatcttcttgctcttctgtgtattgttcccatattaccttactccacaattcaattcgattggaaaccccgatgacaacacattctttttccagttttgcgtaattcagaagagatgacgcaatattaacccttccctgcttgtccagttcgcattcggtcgcaccggaaaaaaagaatcgggtaaatgcgcgggcgtcttttttggtgagcggcagagccttcagcttttcttcaatcagcttccattcattcatcggatagccgaaaaggcattggtcaagtcctcttgtcagcacaaactgctcaccgaggccttctctgaattttgcgggtacgatcatgcggccctttgcatcaattgtatgctggtattcacccataaacatgataaggacccccactttctcccctaaactcaccactatccgccacttctctccacaacctcattttacactgtttacacataaaaaaaaaccctgaactattcagggttctttaaaactttatttcaaagtttgacaatctgatgttggttttgaaaagaaaatggcagatgtttgaaggttgtgaagaattttggaccataacggttcaaataatacattacattccaaatccgttcctgcggagcgccgagcggtctgatgctgttttggattctttcatagtcacgcagcacaaaaccttctttttcttcaattcttttcgttaccgtccgttctaaaaacaagagctgatcctgaatgaaggcggcattcttctgtaagagcggctcaaggcttgaatcgaccttcagcgcttcgttccttgcgcttttatggacagcttcaatctgcgacttcgcctgttccattacagaagaaaactcttccggaatctgctcttcaaaataagcgtctttcaggtgtccggtgccgtgttcgatcgcttcctgaagcggaatattccgttctgaaagcttcttttcaatatggcgctcaagaatcgtaatgttcagtctcggcactaccggcgtcatgcggaagcccattaatgagaaagcctgcttcagctcaccccaataattgatctcccccggtcccgcgataaacgccagagtcgggatgagaaactcctgcataagcggccttgtcacaacgttattgctgaaacattccggtttttcttccatatgggtatgaagctcgtcgttcgtccacttcaggtcaagctccttaatgacaaaaacgccgttttctttttcaattaagaaacgctctccctcgtgttcgtaaaacagattagcctgatctttgtccgattcaataatcgggtgataaccggcttcccgcataagacgctgctggtctgacacggctttgacaagctcgtgattgtgttttaaaatctgctgaaacatacccgtttccagctttttaatccccggatctcccgaattcatcagaataaggccttcttcttgaaacaagtcggcgatcaacagctcaaaaaagtccgtgaatgtctctgatgagcgtaaacatcgcttcacgttttgaaggagtgtgtttgtgtgatccgtttcctcaaaagcagcgaacacttcatcaatccaagccgcgcatttttcctgatcaagctcggttttagccgccgatgtttttttccagtacgactgcggcagtttccgcttcaccggacctttattctctgttgacgtatgcacataattaatttcttccagatcgtgatcttcacccgccacccagaaaatcggagcgacaggaatctgcagcgcctcttcctgctgtctggcaagtacgataatggagataattttatgtatggtgtaaagaggccccgttaaaagaccggcctgctggccgcctacaaccgctgcgctttttggatctctcagtttttcgatggaggcctgcatggcggcggagtgaaatttttcgtgataggaggataaataatccgctaattcctctctggcaaacggccgcgaagagaggtcatgaagccgcttttgccatacgtcctctgaatgaatatcataatcaaaaaatgaagacatgttttctccatctatatagtgctgcacaaacttattttgacttttgatggaaagttcagttagctgcatctgtctggaacttcctttctccaataaatagttaggtttccgaaatgagtatagcatgttaccggaaaacctcaaaagactttgtttcaatttctttctaacgcttttatgctgcggtgtaaaaacgtgagatgaacggccggcaatccgcggctttccgcttcttttacaaggtagccgataatcgcatcggcctcggtccgcctgcctgccatgatatcgacgagcatggaagaatgatttttttccgtcagtctgcaaacttcgcaaaccttgttccacgctttttctctatcggcgaggccaagtattgtctccgcttcttcaaacacgtttctcatatattttttgtaagcgtcatttcttaacagctctccgtttttcacgcgcagcaatgcagttaacgggttgatgcatacattgatgatcagttttcccgttaaaagccgataccagtcgttttcatcatatacgggaaaatcccggtgcatgccggaaaagatgcttttgagcgtttccggccgggatgcgctgaatacactccatcttacggctcccgctcccgtatgttcaacggcatgatccgatatcttttttgctccgtgctcaactgtgccggcataaagcgaatgatccgtatgccaatctctaatgtcgtgtatgtgtcccatgccgttttgcaaaaacagcacattcgtcccttttaccgtctcaagatcccgcagcacagcactgagctggtgctgtttaacggctgcgattaagaggtcgaatccggaagtgatgcctgtttgcgctctgcatgccgccgtacattctattccgtctttcaaaagccgtataccgcctgagttaatcgcatcagcctgctccgtccgccgcgtaatgactgttacctgatggcgggacgataagtagtaagcacataaaaggcctaccgctccgccgccgataattccgattttcacactgtcacaccctatatctgcatttttccatattatcatagcagaagccgccgcaaattacttcaatttcgttttgagcaaaaagacaggcaagcatattatagttggaattttcaattaaagcgtttacaataatggtagaacacaacaaagggggagtttgtgttgaaaatagagcgcctgctcatcaactttaagacactcgaagaatttaaaaggtttaaggaatacgggatgcaggagctgtcgatgcttgaagatcttcaggataatatcattgaaaatgacagcacctcgcctttttacgggatttacttcggggataaactagtggcgagaatgagtttatatcaggtaaacggaggcgcgaatccgtattttgatcagcgtcaggactttttggaactttggaagcttgaggttcttccgggctatcaaaacaacggatacggaaaagcgcttgttgattttgcaaaatccttcagaatgccgatcaggacaaattcacgcatgaaatcagcagaattctgggataagatgaattttgagcccgttaaatatgatatggcgcgtgataaaggagaaaatccttacatctggcatcccgatatggacggtgaaatgacatccggagaaacggcataataaaaaaccggccgggccgccgccctcaggccggttcattttacaggctctgcgccgatttcctgtcgtcttcttttgaattgaccatccttctcgctctgtccataatgtcaattaacgctttataatcttcttccgtcatctccagcttgtttctcaagctttcattttcctcacgcagatcctcgacttctttttgcagcgcggtcagctgttctgtgagtttttctttttcatgacgcacatccgctgcggccggcgactctttaaattgctgaagaaacaaaatgacatcatcaatggacagctctttttctccttccgccctgcggatcggaggctgtttgacggttcccggcagattggcggaatgcaccccgatctgctttcttaattccttccgctgttttttcgccagttctatccctgactgatattgttttctgacataagaattccatctgaacccgcaggcggcagccgttctcgtcagcgctctgccgacttcttcaaaagcggaaagctgggtcccgccttcccgaatatgcctgagcaccacttcggccagcagcaaatcttcatcttgcgtccacgcgtcttgtctcgttatcgtcaatcgtatctccctccatatttgctcatttacctcatacatatgccgctgatagattagatagactactggcgctcacaattttttcggcggaagcaggccggaggggcaaaaaaaaagaaaagcgcaggaaccgagattcccgcgcttttcttcatacattaattgcttttaacatttatgtctttgccgttgtatgatccgcatgctttacatacacggtgagacaatttcatctctccgcatgacgggcattctgtcataccaggtacatttagtttgaaatgtgtacggcgcaatctttttttcattttagaagttcttctaaaaggtacagccattattcccacctccttaaagagttaagattcatcatcttgtgttaagagctttttcagatccgcaagtctggggtcgatttgatttttcttgtcttcctcagaaatcacttgccaatccttccccacttggggagcggctccttctttttgttcagtttcacaaaagacttgcataggaatttctaaaagaatctcttcttttacgatcggagttaagtcgacgatatcgtcttcagcaatatgaacgtcctcatcttctatatcatccgacttatgaaatctaaacagttcttttgtcgcgattgtaaatggatacggcacatcaactaaagttcttgagcacggcaaaaccatttcgcctgaaatcgtaaagtcaaacgaaacttgcttggattcaatctccgcgcggcccttcacccggacgggagaaatgcggcggatgtcagaattcaattttgtcagctcatttaactcaactgtttcatcaaattcaaagctctttttcgccatttgatgaagctgataaatcgtccatttcatttgtatcacctcaggaaagcaacaaacatgattatagcttttcagaatgtttttgtcaatattttttctttacagcataatgccgccgtcatgcaatcgttgacagccggataggctatgcatacactaaacgaaacggactaaaatatgcacttcatttgcaaatgtaccacacgaagcaaaacatagcaagaaaggcgggacaaatatgaaagcagtcggcctggttgttgaatataatccctttcataacggacaccgctatcatgcggaacaagcaaaaatcaaaacggacagcagcgtcgcggcggcggtgatgagcggcccttttttgcagcgcggagaaccggccgccgtctcaaagtgggcccggacaaaaatggcgctggaaaacggcgtggatatcgtcattgagctcccttatatgtatgccgtacaaaaagcggaattattcgcgcgcggcagcgtttcgcttcttcatcatttaggatgcagcagcttgtttttcggcagcgaaaacgggcggatcgaaccctttattgaagcgtctgaagcgttcagccgaaaggaagatgactgcagcctgattctgaaagaggagctgaaaaagggtctcagctatccggccgccgcctcaaaagctttttcacacatattcaaagggcgggacatgctcgatttgtccaagccgaacaatattctcggttttcactacgttagagcgatacacgccttcggttccgctatgaagccttatacgacagccagaatcgcttcccagtatcatgacgccgagcttcccggagataacagccggatagccagcgcaacaagcatccggaaagcgctgatagaaaaaggaacggcggccgcaaggagctttctcccggaagcgtctgcgcgtgagctggaggcatacagaaattcatacgggatatggcacagcaccgaagactatttttcatatgtaaaatacagcctcagcactctgtccgctgaagaattgagccgaatctatgaagtggaagaaggccttgagcacagaattctgcgcaccatcagacaagcccgatcctatcgcgaaatgatggaacgattgaaaacaaaacgatacacgtggacgaggctgcagcggatgaacacgcacattctgacacggacgaaaaaggaggacatgcatcggctcttacagccttcaagcgctccttatatccgtcttctcggaatgacgaaaaaaggacaggcgtacctgtcggcaaagaaaaaagagcttaccgcacctctcgtcagcaagctctcttctttctctcatcccgctctggatctggacatactggcgggacgggtttacagcctgccgataaaagaacctgaacgcacattttttgagaaacaggaattttcacaagcgccgatccgctatgatgaagacgaacagcgttttttgaatgcgtaaaaaaagcacctgcctgtatcaggtgctttttactttcagatgatccaaatagtcaagtgcgtcctgcatggtgtcgacagggacgatcttcatatcggacttgattgctttcgccgtttttaccgcatttttgtaatcagaattttcagctccgttttgattcggcgcaaagaaaatatcttttcccgctttgtctgcggcgacgactttctgatcgattccgccgatcggtccgaccttgccgtccacgtcgattgtccccgttccggctatattatagccttttgtttcgtcaggttttgtcagctggttgtaaatttctaaagacatcatgagacccgcagaaggcccgccgatattttcaatgctgaaatggagatccggctttactttcacgttccgatccgtatataacgcgacgccgattcccgctcttttcgggtcgtccgggaatgatttcagcgcaatgtcaacggtcttttctttcgtgtcccgttcaatgtgaaacgttactttctcccccgcttttttgctgctgatataatcaatcagcttttcagcggattcgtatgttttcccgtccgcgctgatgattttatcaccgacctctatttttccttttgccggcatgtcagagacgactgagctggcgaaaatcccgttaaatgagtatttcacctgtttcccggctttttgataagcggcaatgaccgcgttttcttgggagcttttcatcatttgcagctggcgcttcatataatccgagtccgattcgccctcttcttttatgctttcatcagggacgatttcatcgtaaggatgcactttcgcccaaagatatgtatacggattggcggggcctactttgacagtcatcaaggaaaggcttcctttttcaggatagcctccgtccaccttaatcagcggtctcagctctgatgcttctcccggctgtgtaatgtaatacggaagcttaataaatgtaacagcaattaataagatcaggatgataaacacccagcgaaaatgttttgctttcatatgagttagccctcccagttctctatttcttgtttaatccggccgatcatccggtctgcggcttcttcgcccgctgtgatcatatgatcaatgttggcaaaagaacttgagctgaatgattcaagagaagggcggatcatgacgtctgcggcaatggtctggtgacggaccaattcattttgcagtatatccatactttgcatgattacatcaaaaatatgtgccgctttttccgtttttttcacccgggatacgtcagaggcgatgacgatatcagcacccatgtcttttacggcggacaccggtattctgtcgaccaccgcgccgtcgactaacatacgtccgttcattttttgcgggacgaaaacgcccggtatgctgatgctcgcgcggacggcttcggatactgaacctttcgtaaaaacgagtttttcgccggtctgaaggtcgcaggccacgatgccgagcgggatccgcagttcttctatcggcttgccgtacgtataggcatgaacgagctgcctgatgcggtctccttttaaaaatccgagcctcggcatcgtataatccgcatacagccgccgcttaaatgctttggcgacttttttcatcgtagccacgtcatgcccggccgcataaaagctcccgactaatgctcccatgctgctgccggcaatcatatcaattggaatctgatgcttatgtaaactggataacactccgagatgagcgatgcctcttgcccctcccgaacctaacgctaacccgattgtaggtttggccaacgcgacgaaccccctaatagacatcctatacatgaattctatggtctaaattgaacccctatgctcgtatattagtacaggatgacaaataggtacttgcccggccgcctttaaggtctgttctatattttatcatgatataaatgtcagtgtgcaattttagcatcggggaggtaagaatgaatttgtctaagtttcatacatttttgatttcattgtttttcatttttttgacggcgacggttatttcacaccctcaggcctcattcgaagcctccaaaaccggtctttccatgtggtgggaggtcgtttttccttcattgcttccgttttttattctatctgagcttttaatcggattcggcattgtcaaatttgtcggccttttactcgaaccctttatgcgtcccattttcagagtgccgggggtcggcggatttgtactggctatgggcatggcttcaggcaatccggccggcgcgaagctgactgcacggctgcgccaggataaacaaatctccagagtagaggctgaacgcctcgtctcttttaccaattcatccaatccgttatttatattcgctgccgtggcggtcggcttttttcataacgcgtctctcggcattctgctggcatcggctcactatcttggaaacatcgccgtcggcctgacgatgcgttcatacggacggaaagaagaagcggcgtataccggtaaaaagacgatcgctctcccttctctgaaggaagcatttctggccctccacaaggcgcggctttcggaaaagcggccgctcggaaaaattttgggcgacgccgtcacctcttctgtacaaaccttgctgatggtgggcggttttattatattgttttcggttttcagccggttattatcaatcgtacaagtcatggatgtgctttctgtatttacaaacgcgctgctttccctttttcatcttccggcaaatctggacatccctcttatcagcggaatgtttgaaattacacttgggagcaagctggtcagtgaagctgatgccgccttgctgccgaaagccatgattgtgagttttattctcgggttcagcggcctttccgtacaggcccaggtagccggcattttatcggaaacagatatccgctttaaaccgtttttcgcggcgcgtatccttcagggcatttatgccgcactctttattctcttactgtggaagccgctttaccttgcattggacgaaccttaccagtccgtattcctccctttccgcgatcaggacgcgggatctgctgccgtcagcggatggaatacacttgttgaaaccgggcccgccatcacgctgacagctctcgccgtatacgcattgatttattgttacaggctgtcagcacggacaaaaaaaggatgagacgccgatcagcgcttctcatcctttaaatttctgcttcagcgcctgttcaacttccggaggaacaaactctgaaacaggcccgttatattttgcgacttcttttacgatgcttgaacttaaaaaagagtactgattgttcgtcatcataaaaaaagtttctattgattcgtcaagcacgcggttgacggaagtcccctgcatctcatattcgaagtcagaaacagctctgagccccctgataatcgccttcgcccgcttttttttcgcatagtcgattaacagtccctgtgacgtctcgaccgtaatattcggaatgtcttttgtcacttctcttaacagctcacagcgttcctcgactgtaaacagcggctgcttagaagaattattgagcacgcatacgtacacctgctcaaacacgtttgccccccgtctgataatgtccaggtgtccgtaggtgacgggatcaaaacttccgggacatacagctatacttgccacatcattaccccctatttcggtatatcgtcactcctgtaagcccgtaaatttcccttcttgttacagaaagcgcgccgacggcttcaggaagcacaacggctttatcatgctcggctacgacaaaaccgtcttcattcagcatgttctgctcatcaatcatttcgataagcgctttcagcttttgttccttatacggaggatctaagaaaattccgtcaaaacctttttcccgtttcgccgcggcatagagggcccgctctgcatcattgcggtatacttccgatgaagacagcagatcgagcgctttgatattcgcttttaccgtttggatggctttgaaatcacgatccacaaagatacagcggtcaaatccgcgcgacagcgcttcaatcccgaggccgccgctccccgcaaacaaatccagccctgttcctccgtcaaaatacgggccgatcatattaaaaatagactcttttactttatccgtcgtcggccttgttgatgtgcccggcaccgcctttaaggctcgtccttttcttgaaccggaaattactctcattattcacaccactttttctgaaaactttgatgtttctcatcggctgagccgttatgtataaaaacaatccctatcttatcataaagcattctttcaaacaatgaacgtgaaaaacgtgtatacatattcacattcctgtcaagactacgtgtaacagcatcaatgaatgatgttgttgccaaccgcggagaagacttacgtttccccataagttcttcctccggtttctcctctcccttttccttctccttaacttgttaaggaatagaaggaccccgcaggtatctgcggggatttttttatataccgactttataatcgtactctttcgctttatcaagctttgattcaaattccagctttaaaaaaggtttataagaaggctctaccttcttcacataagaataagaagaaatcttttccattgttttttcgatcaggtccatatcgcaatacagcacaacgtatttcagccgcttggaaacataatgaacgttgccgaattttctcagcattttgctgtgttttaaagaatgcagatatacgattatgccttggcgcttattttccatcatgatcacccgcctgactttctgttcattttatgtaaaagacgagacggccgtctcgtcaggaaactttgcatccgcagccgccgccggaaccgcagccgccgccgcaggatgacaggccgtcaaaataaggattccccgtcggcacttttacatgctccgagacggccgttccgagttcaatgctgatctcgtcaagcagcgactgaagctcagtctccgcttttttaaattcggccaccttatcgtttaaatcgagctcccgcttcatttctctcattttgcgggaaatctctctataatcaggatggtatttgccaaagcgctgcacatcctcatactgctctttaacgctcataaaagaacgaatgatccgccctgcctcttcatcttcacggagacgcttgtaacaatcgcggtaattttcagccgtctcagactgcagaatcatgccggcaagctgttccgcttcactttgaagcttgacggactcaattgttgcatacataaatacgcacctccagttgctagtttaccatgaaaccacccaattggaaaatgcggcgtttaaacgctttttaatcctgcgaacgcatggcgtgtaccatctgcatcatcatctgcgccatttgaatcccgtttgagaattgacttacccgatgcggtatcgtcttttcataaaaattcatcatgtcaagctgaaaggaattgagatcgtccggttttctcgcaagtctgcggtaccagacgggacgctgccgtataaaccgtttccgttcctcatctgcggatatgaattcctgaacctcttttcgcatacacgatccccttctttaatcctttctgaatgaaaaaggatgttgtccggagccttgccggggctgcttcgtgctgctccccgaaaattggcttaaaaggctttgcaatgatgaaatggactggctcattttattgatctgctcattcatttggttgatatccatctttttgacggcagtgaccatttttgaaacgaaatcgttcttttcagctggttcctgtttggtttccgcgtcggaagaaggctgaacggcctcgtctttaaaagggtcccacatcgaatcatcctcgcccaggagaacccagttttcatagacttcctgccagcttctttgttccttgcgaacattttggatcagtttgggatgcttttttacgaattgtttaaaatcatcgattgattgccgtgattgctgattcgccacaattctcaccccctccgaaaagttttgcctgctataatgtatcggttcatgcgccttaatgttcgcctaaattgcgaaaaaaagcaggtatatttttttcagcaggagcgccgctcgcgaaaaatcataaaaaaaccgcgggggacgcgcccctctgcggttttttactgccaaggcttaatgaagttttgcgtataatacttccggtccacgccgacaccgaggtgcgtataatccgggcttaacagcgccttcctgtggccttcgctgttcagccagccctccacggctgcaggaccgtccacatagttgtaggcaatattttcaccggcctcccggtatttcacatcgcctttttccaagcggtccttcagagtcccgtatttctttgagacgtgagagaaatacttgttatccttcatgtccttgctgtggccgaatgccactttcgcggcgccttcgtcccatttcagccttgccagtccgtgtttcacgcggatgacatttgtaatgtcgagaatctgctgttcactcgctcgttcaatgtcgttccattttttatcagaaactggctcgggttctgtcagctttcctctgtacatgacctcatacggcctttgtttcaccagcgtttccgcatcaaaagccctgatgcttgacagattcccgtcaaatttgtccatgtacagctgaacatacattccgcctatcttgacggtgggacgggtattgatatcttcttcggaaaactcaaaccgatacgtgtttcccttgtcagtcacattgacaaaaggagaaacctgcgtcgttttaaaaacttcgcccgtcgattcgccgatcttaaacggttttgcgttgatgccgcttcccgaagcgtataaagtcacggctttatcattcaaaataccgacttgtacgtattggtctttcccctggttgtacacccaccactcgtaatcgtaggcagaaggatctttccgggacggttccccaagtttctttttcacatcggcggcagatttccccatgagagaaagcagtccggatgacggcattttcagccgttttccgctctcttcttcattggaaacctgaggctcctcctgattggtctttttctgaggagccgatccatattgtataaacagaacatacgctccgtaaataagcaaaaggataacgagagcccttgcaatatttttcaacctctcacccccatatcatcaaaccgttctgtttttgtgtactcttatacagtacagcctatttgcatcgtccgtgatttatgtttaatggataaacccctccggacctccgtcttcagaaatgtcagacagcgcccggcctgcttgctcatttgattgctcggccaacgaaagatcgccgagcgtaacaatgccgaccagttttttatcccttgtgacgggaattcttctgagctgatgttcagccatcaaatggagcacctcctccacagaggcgtcttcttctgcactgataacccgctctgtcattgcgtcggttattttttgagagttcggcttttttgaagcaattccccgtaatacgagatctctgtctgtcacgatcccgacaagtgtggcgccgtcttcatccactatcggaatggcgccgacatccgcgtctttcatcttcaccgcagcttcatatacattatctaatactgtacaatattgcaagtctgacgtcatgagcttattgatctttgtcattgcggaattcctccttttttctgctactattgtcgtcaaatttttgtttttgcatactttcaccgtatgaatcattgaaagtgtaacgctttcatactatgattgtcaggaaagggcatttttaaaaggagggggaaggtttgaagtttgaaaacagcggtcttgaaggggtaacagcggagctcagccgcttgaacgatctgatggaaggcaaagggctcattctggctggacaatgggattatgaaagagtgacttacgacaaaaagttttcagtacctgaggggacattttatctgcggattcaaggaacggcaaaagagggcgatgtcggcggcagacgggccgtgattcagctgaaggcccctcttttaggaaagcattattatccgcacggcgtagaatacggcagcgctgaagaatttccggaacatgtcatcgctgaaagcaaagctttactgcttgaattggaagagtcattaaaaacagtgcaaatgtaataaaaaagtacagcatattctgctgtacttttttttatgagacggtatgctcgatatacggcggctctgacagcgtatctttttcccgttccgttctgacccactgaaaaaagatgacagccaaatatattccgtagaccgcctcttgaatgattttcatcagcactgccccaagctgctgatcttccagaggaggtagcgtgttaaacatctccggcccggataaagggatctcctccagcaaatctaaaggaacgcaaagcttcattgcttcggcccaagccgccggatctgtatacgtggcatacatgggcgccccgctgaacataatgagcgcgcaggccggcgttaacaaaatcccgtccgccataatataccccagcttcattaaaccgctgagacggggcagaccgtccaccttatgcacaagcggccaccacataaaaaacgccgttacaaagatgagtccgttcatcagcgtgtgatacagcgaatccgttttgacgaaatcaaatataaacgggatgtgatacagcgaaaaaataccgttaaacagcactaaagcgataagcggcattgaaaaaaatgaaaacagcggctttacgacaggacggaagatcagttttttccatgcccagccgggaattccggagatcaacagcggcggtacgactaaaaacagaaccgccatctgcgccatatgggcgctgaacatcacatggcccaataaatcgaccggacttcccgcagccgcgtaaaaaaatagcgcggaaagcacaaacagcaccttctccttaacggccacacgtcctttatgccggctgcaccagtaaaagtaaacacctgttatcacggcagttatacaaaacagatacgggctccacattgcgcgaaacccgaacatttccaaattaatcaaatctctcactccccgccgccccgattaccaccaaataatcgtgacaaatgcaagcacggtgataaacgcgacaaatattcccgaatacagaaataatgacggcgcttcatgccccttctggctcatatgcataaagtaaaacagctgaaagatgacctgaatgaccgcaagcaggatcagaaacggcatcgtaaaccatccggcaatgccgtctgcagccaccgtcaaaaacgcgacaagcgtaaggccgatcatcaagccgaaggagatgacctgatatttcatctcctcggcatttttccttctccgatattcaagatccgtactgacagtctctctgtttttgttatcgtccatcgttatcccaccatccccatcaaatatacaacggtaaagataaagacccacacgacatcgataaaatgccaatataagctggccacataatatttcggcgcattataaaggctgagccctcttttcgcattccggatcatgagcgcgctgatccacaacagcccgaacgccacgtgtgctccgtgtgtgccgacgagcgtgtaaaacgctgagccgagcgcagagcttgtaatggtaaatccgaactcgtgagtgtaatgcataaattcatagatttcaacccctaaaaatcccgctcccaataatacggtaaccagaagccacacctgcatttttttaaaggagaaatttttcatatgatacatcgcatacacactcgttaagctgctcgtcaaaagaagcatcgtcgcgataaacacgatcggcagctcaaacatctcagccgttgacggccctccggctttagattcccgtaaagcaaggaatgtcgcaaatagcgaggcgaacagaaccgtttcgccgccgagaaacagccaaaatcccaaaaacttatttttcccctccagcgttgctttttcaggagaagccggaaaggtttcagccgtcattttttcctgcagctgcattacgccttcacccctttatcatcattcggcagatcttctttgtgaatatgatagccgtaatcatcgaccacagagcgaagcagcatggtaaagaatgtgatgccgagccctatgaagataaccggaagcccccatgaataatcggagtggtataaaaacccgaacgctgccacaaacagcccgaaagatatgataaacggcatgatggagccgttcggcatatgaatgtcctctacaggctctgcaggcgccatcccttcatttccggcctgcttttcaatccacagcgggtcaagtccccggacaaacggaagctgtttaaaattatattccggcggcggcgaagagaccgcccattcaagcgtacgaccgtccagccacgggtcgttcccgacgtatttcccctttattgaggtataaataatattgacgacgagtaaagcggccgcgcctgccatgaaaaacgcgccgattgaactgatcaggttgccggtatcaagcccctggccgggcagatatgtgtaaacgcggcgcggcattcccatcaagccgagaaaatgctgaatgaagaaggtaagatgaaacccgataaaaaataagacgaacgaaattttccccatcgtttcatgaagcaccttcccgaacattttcggccaccagaaatgcacgcccgccaggatgccgaacacaacgccgccgataatgacgtagtggaaatgcgctacgacaaaatacgtatcgtggaactgataatctgccgctgcggccgccagcatgacacccgtgactcctccgagtacgaaagaaggaataaaggcgacggcatacagcataggcgtcgtgaatttgacgtttcctccccagatggtcaaaagccagttgaaaattttaatgccggtaggcaccgcgatcgccatcgtcgcaaccgcaaatatcgcattagcgatcggtccgagtcccgttgtaaacatgtggtgaacccataccatgaacccgagaaagccgatcagcacgatcgcaaagaccatagacgaataaccgaacagacgtttcctcgcaaatacgggaatgatttctgaaaaaatcccaaaggcgggaagaattaaaatgtatacttccggatgcccgaaaatccaaaacagatgctcccagattatcgtattgccgcccaattcaggattaaagaaattcgttccgaacaaacgatccagcatcatcagcgccaaaccgacggtgagcggaggaaatgcgaataaaatgagtgccgacgccacaaatgtcgtccacgtaaacagcggcagtctcatatacgttaaacccggcgccctcatattaataatcgtggcgagaaaattgatccccgcaatgagcgtacctaagcctgatatttgcaggccgagcacgaaaaagtctatgccgtgccctttcgaattcagcgcaagcgacgcgtacgacgtccagcctgcatcaggagcgccccctaaaaaccagctcagattcaaaaagatgcctccgaagaaaaacagccaaaatccgagcgcattcaaaaatgggaatgatacgtcacgcgccccgatctgcagcggcacaaccgcgttcatcagcccgaataacagcggcattgccgccaggaagatcattgtcgtgccgtgcatcgtcataatttcattaaactgctgagcacccataaaatcgttccccggcctcaagagctgaatcctgataagcatggcctcaagtccgccgacgacgaagaaaaatcccccggcgatcatatataaaatcgcgattttcttatggtcaaccgtcgtcaaataatcccaaagcaaagagctttttctttgctgtcctgtaagcgtattcatcatttgcgacctcccccctgatatctccctgtcctcacttgttctccgctttcagcccttttaaatattcatacagcgcatccgtttcagcgtccgagagcttcggataagtgcctgtcattttattgcccggtttaatgctgtccggatttttcagccaggcttttatattctctttattcgcatccttaatgccggccactttgacccgttcaccgaaggtagcgaggttcggagccgttcttgccgcttcagcccgtttatcattgggctcaaccgcatgacagctcaggcagtttttttccttaaacagctcttctccttgtgctgctaaatcggaatctgttgtatgcttataatttttcatcgctttcgtccattgtttaaattcttttgacggcagcggtttcactttgaaatccatcagcgcatgtgaaggtccgcacagctctgcgcatttcccgaagaaatattctcccgcttctttgctgcgtttagaatcgaaggtcagaaagaaagtgttgtcattatccgtattcgtatcgatttttcccccggctgacggaatccagaaagagtgtttcacatctgaggacttcagcttgaaatagacgcgttcatctgtgggaacgatcagctcctgacttgtcacaaacccgtaatcgggatactcgaattcccaccagtataaattcgcccttacattaatcacgagcgcatcctctgctttacggtttttcttatccatcggcgacgtatccgccagtgccaatgtatcgatgacaaccggaatgacaagaataatcagaagcaggatcggaataacggtccaggtgatttctaaaaaacggttcccctccacctgtttcggtatcgtgtcttcccctatacgcgaccgtctgaatctcacaatgacgtaaaagaaaataactgctacgaccgcaacgacgacaaccatgataagtgtgctgagcaccgtcagatcatattgtttatcagccacttcgccggcaggcttgagtgtggacagaaacggttttccacagccgctcaataaaagcggcactaaggctaataatgataaaagacgccaacgctttaacatttcacccaaccccttttttgaatcagtacgagatgcacaagcagtaaatctgcttccagccgaaatacttcatttcctcatttcttaaaatatgagattttttacttaaaattccatctatgtataaaagcaaagccgcctgattaaacaaaaggtcaaggcggcgtttactagttgtcattgtttgttttggcgatcaaacaagctcattattcaattaaaacagcgtgaagaccaccatcgctacaaaataaatggtcatgtagttaagcgaatagacaaacataagggttgcccacttcatgatgtttttcatgcggaatcccatcagtccgagaacaagccatccgacattcagcaaagtgccgagaatgacgatcggaagaccgagactgccgaggaaaaacggaagcggcagcaggcatgcgacccagacgataatctgtcttttcgtcacttcaaagccgtgcactaccggaagcatcggaatattcgctgctctgtaatcttccgtctttttaatcgcaagcgctaaaaagtgcggaatctgccagatgaataaaatcatgaataaaacccacgcgacaacaccgatgtgcccttcaaccgctgtccagccgattaacggcggcacggcgcctgatacacttccgacaaccgtattaatcgtataacggcgtttcgtccacattgtataaagaacaacgtacgtaaacacgccgataaaaccgatgactgctgccatcacggtggtcatcaaaagcatgataagtcctaaagcaatgagtaaaattcctgaccacagcgcttgattcggctgaatctttccggttaccgtcggtcttactttcgtgcgttccattaaatgatcaatatcacggtcgtaatagttgttaaccgcacaagaaccggcgatgatcaaagaagatcctattaatgtaagaagcacggtgtttaaattgcctaaaaaactcagaccggatatatgtaacgcaagccacatgccggtaaaagtcgtaattaaattcgaattgacgattcctattttgataagcgaaaggaaatccttccatgccgtcgtctcttcaatctgtccgtctatagctgtatcgtttaaaattctggaattagccataacgtaaacctcccttacaaacctaaagcaggttttttaagacctgcaactctatcatacaagataatgacctgtaaaaaaacatcctcttaaatattaaacgagaaacaggaatttatttgtgaactttttatgaattttaccaaatccgccggcttcataataaagcggttactttatttctatcagacccatctggaataatcaaccccattatctaagaagtcctgattctattatatttttgtgaacaaacagaattgagaattgccacaaaacacatattcgcttacacttggtacgtatatcattttgtccagtttgttaagaaggtgaatgtaaaatgaataaagctttgaaagcgctcggcgtgctgacgacgttcgttatgctcgtcgtgctgatcggcggcgctcttgtcacaaaaacaggatcgggtctcggatgcggaaggcagtggccgctttgccacggccggtttttcccggagcttaacgccgcttctatcattgaatggagccacagactcgcaagcggtgtctcaatcgttctcgtgctgagtctcgctttttgggcatggagaaaagtcacgcctgttttccgtgaaacaacctttctcgccattatgtccattatctttttatttttacaggcgcttctcggcgcattagcggttgttttcggatcaaatgcgctcgttatggcgcttcatttcggcatatcgctgatttctttcgcttctgttctgattttgacgctgctcatatttgaagctgataaatcagacaaaaagctcgtcaagccgctcagaatcggcaggaaaatgcagtttcatatgatcggcctttcgatttacacgtatatcgtcgtttatacgggggcttatgtgcgccatacaaaatcaagccttgcctgtcctgacgttccgctttgcagcagactgaaccacggacttccgtctcattttcaggagtgggtgcagatgggccacagaacggcagcgctgcttctgttcgtatggattcttgtcgcttttgcgcatgcggtgcgctcctacaaagaccaaaaacagattcttgggggctggatagcggctcttgcctttgttgtattacaggcgctctccggaatcatggttgtttattcagaaatggccaccggctttgcacttgcccattcgctctttattgccggtctgttcggtgtcttatgctatttcttattattaatcgcccgcttccgctatgaatcaaaacagcggaacatctgaggcacatgaaaaggccgaagcatcaaagcttcggccttttcacatataaaaaacctgatcgcacacggggcggatcaggttttttatgtttattttttacgctttttcaatttcgatcagtaaatcgcctgtctgaatcggttcaccgtttttcacatgaatctgctgtattgtcccggagaacggcgcctgtaccgtcgtctccattttcatcgcttcattaatcatcagatgatcgcctttattcacctttgccccggtttccgttaacaatttaataaccgttcccggcatggatgccgcaatgtggcttgggtttgtccgatctgcttttaatttttcctgtacggacgatttaatgctttcatctttaatgaccacttcgcgcggctggccgttcaattcgaaataaacgacacgtgtcgcatctggctgcggttcaccgatagatacaagcttcacgatcagcgtttttccgcgctcgatttccacttcgatttcttcaccgagtgtcatgccgtagaagaaagtcggtgtgtccaatacggaaatatcaccgaagcgttcagccgttttaacatattcagtaaatactttcggataaagagcatacgcgattgcgtcctgatcactcaattccatctgatgcgtttctttccattcttctttaatgccttcaaaagataccggttcaagcagctcacccggtcttaccgtgatcggcgtctgtcctttcagaacgagcttttgcagtttttccggaaatccgccgtgcggctgaccgatctgccctttaaagagctcaacgactgaatccggaaaatcaagcgtttcgcctttatcataaacatcttgttctgttaaattgttttgcaccatgtaaagcgccatatctccgacgactttggaagaaggtgttactttcacgacgtcgccgaacatgcggttgacaacgctgtacatgtctttcacctcattccagcgatcgcccaggccgactccttttgcctgctgctgcagattgctgtactgcccgcccggcatttcatgattataaatctcagtatgcggagacttcatcccgctttcaaattcactgtaatactgacggacggattcccaatattgtgacagtctttccacctgccggacatccatttcaggacggcggctgtttccttcaagcgcatgataaaatccgcttgcgctcggctgtgaagtcagacccgccattgagctgacggcgacatccacgatgtccacacccgcttcaacagctttggcatagagaaagacgccattgccgctcgtatcatgcgtatgaagatgaacgggaatatcaatcgtttccttcagcgctgagacaagttcgtatgcggcttgaggtttcaaaagaccggccatgtctttaatgccgagaatgtgcgcaccagacgcctcaagctctttcgccatagaaagataatattgcaaatcatatttcgtccgggtcttatcaagaatatctcccgtgtaacaaatcgcagcctccgccacttttccggtttcacggacggcatcgatggccagcgtcatcccttttacccagttcaggctgtcaaagatccggaatacgtcgataccggactccgctgactgccggacaaatttttgaatgacattgtcgggatagtttgtataaccgacggcatttgatgaacgaaggagcatctggaacaatgtgttcggcacttccttacggagatcttcaaggcgtttccaagggtcttcttttaagaaacggtacgctacatcaaatgtcgcgcctccccacatttcaaggctgaacagttcaggccacagggcagccgtaggattcgcgatttttttcaaatcgttggacctgatccgtgttgcgagcagggactgatgggcatccctgaacgttgtatcggtcaggagcacggatttttgctctttcacccagtctgcaagtccctcggcgcctctttcatcaagaatctgtttcgtaccgcttgccggcttttccccgatatctaacgtaacggtctgaggcttatcaaatgcaggtttttcttttttcccgattcccggaaaaccgttcaccgtgacattgccgatataggaaagcatttttgttccgcggtccttctgttttgggaaaacaaacagctcaggcgttgtgtcgataaacgatgtgtcgtattggcccgtcaggaatttttcatgctttgccacgttttcaagaaacggaatattggtcttaatgcccctgatcctgaattcctgcaggttgcggaccattttcgctgatgcctgttcaaacgtcagcgcccatgtcgacagcttgacgagcagtgaatcataataaggtgtgatgacggcgccctggaagctgtttcccgtatcaaggcggacgccgaaaccgccgcctgagcggtaagccataattttacccgtgtcaggcataaagtcattcagcggatcttcagtggtcacacgtgattgtatcgcatacccgtttgtaaaaatgtctttctgctctgggatattgacggcgcggctgtgcagtccgtggccctgcgcgacgagaatctgcgtctgaacgatatcaacccccgttatcatttccgtaatcgtatgctccacttgtacgcgcgggttcacttcaataaagtaaaattcaccgcccgctacgagaaattccacggtccccgcgttgatatagccgacatttttcgcaagcgccacagccgcttcacagatttcgtcccttaattcaggctgcaaagatacactcggcgccacttcaatgaccttttgatggcgtctctgaacggaacagtcccgctcatacagatggacgacattgccttctttatctccgatcacctgaacttcaatatgcttaggattttcgatcagtttttcaacatacacttcatcatttccgaatgcggctttcgcttctgatttggcccgctcaaacgattctttcaattcgctttcgcttcggacgattctcatgccgcggcctccgcctccgagcgatgctttaataataaacggaaatccgtggacttttgcgaattgttcgacatcttttaatgtttcagccggtccgtcactccccggaataacggggataccggctttttccgcctgctccctcgcctttaccttatctccgaacatatccaaatgcgctgacgtcggtccgatgaatacgatgtcctcttcttcacagcgtctcgcaaattggatattttcagagagaaatccgtagcccggatgaatggcatcaacgccgtttctttttgcgatctcaataatcccttcaatatcaagatacgcgtcaatcggttttttgccttcgcccacaagataagcttcatccgctttatagcgatgataggagcccgaatcttcttttgaataaacggctaccgttctgatgttcaattctgtgcacgcccggaaaatccggatcgcaatttctcccctgtttgctactaacactttttggatggattgttgtgacaaacttttctcccccttggcctaataaatatgtagtttataataaaggaatatccgccctgtgtatacacttgttttttagagatacacagatttttccgtctgccgtctttttacccctttagacggaacgggctccctctttttcttcttttctgagtacttgacatgcatgctgacattcaccaatataccggcgctcgtcaataacaaaaacattgatgatcccccgtagctgataaacggcagcggaacacctgtgatcggaattaaaccgctgacaccgccgagattgataaaggtctgaatcgcaatcatgctggatatcccgattgccaaaaggcttccgaacggatcttcacattttctcgcaatataaaaaccttttaacaccacaaaagccagcagcacaatgacaaacaggacgccgaaaatgccgagctcctctgaaataaccgccataataaagtctgtatgcgattcaggcagataaccgtatttttgaatgctttctccaagaccgagaccgaaaaaaccgcctgagccgatcgcataatacgaatttataatctgcagacctgatgtgctggcgtatttaaatggattttcaaggctttcaaaccggctcatacgcccgggtgtcaaaatatcgtcccatttcagataaatgatcgggctgacaaggagtaatacgattcccgccatgagaaccagcctgagcagggtccttccgctgaatcccgaacacataatgacgcaaaacgcgatcagaccgataatcatcgccgttccgaagtcgggctgaatagcgataagcgcacaaatgactacggtgacgatcaccggcggcgcaacccccgtcaaaagctgatcgatgtagctttgtttctttgcgtacaccgcggcaagatacagtatcagggtcagcttgacaaattcccccggctgaatggccattccgccgattttaaaccagctttgcgcatttccggcaacatgtccgaaaacaaacagcgcgcaaagcgcagccactgacgcaagcagtatgattttctgaatcttttgatgggcgaacactttgtacggaaaaacggccgcgataataaacagcacaaaccccgcgatgacggcgaacagctgccgtttaaagaaatagtcgctgctcacgccgtaacgcataacggcggtaatcatgcttgagctgtataccattaccaatccgaaactgcacagcagaatgatagcgcatatcaatgaataatcgtaagattttaacattcttttaaacataacatcctctttcctgcttaaagcttacgtttaatacctattgcgtattatattttactataattcataaacaatttacgcagtttctttatagtttttcggatgaaatgcagattaagagaccgtcttacgaaaagaagatgcaaaaaaacggtttacggttataaaaaaacccaaaccgttgaatagtttgagtttgatcatttattttcctgtaaacgcgtcatgcaaagcagacagttctctttcaagtctgtccagcagctctttgccgtcgttttcgtcaactaatcccaggcggacagcaaaatcgatttccctcgacagtccgaacatctgagtatccaagacctcttcatacagaggacattgaggcatcgttaagttatccatttgtactcggatcagcttcaaaatcttctcagcatctaacttcaacagctcgaatgctttctgctgatggtcaactataatctctgaagccaaaagtatccctccgttccccaggcgagtacctaattcttctatttatcataaagggtatcagatgaaattgcaagaggatttaagcagatgttatgataaaaaatgtttcaaaaaatactcagcctgtatttctcagacatgatttccaaaagcttcacacccgcgatgctgttgcctttttcatcaagcgccgggccgaatataccgattccgaagttgtacggcgaaatgcccatgattcctcccgaaacgccgcttttagcgggaatgccgaccttgattgcgaattccccgctcgcattgtacatgccgcatgtcaccataaacgtcttgcagattctcgccacatcttttttaatgacctgctccccggtttccggatgcttgccgtcaagggcgaatacacagccgattttggctaaatccagactgctcatcttaatcgcgcactgttttgtatacaaatccatgacctcttcaacatcgcctttaaaaatgtcatactgcttcatgtaataacacatggcccgattaatcatggaagatttgaattccgattccgcgacatgtctgcaatatgtaatgtcctgattgttcgcaagtcttctgatgaatccgagcaggtaatccaggcggtctttcggcgaatgccctttaattaaacccgtaacgatgagagctcccgcattaatcatcggatttaaaggcttgcccggattcactgtttcaagcttaatcatggagttaaacgggtcgccggtcggctcctgacccacgcagctgaacaccttttcctttccgtaatccatcagtacgagcgccagagaaagcactttcgaaatgctctgcagcgtaaatgtccggtcggcgtctcctgccgtcagacatgtattttccgcatgataaatcgtgaccgaaaggctgtcttgttcagattcagccagagccggaatatagtctgccactttgccttctccggttctttttttcgcttcctgaactaatgcgtccagctcttggtaatgccggcataccatgtcgatcatcctcacttcgctgccgttgtatacatctaatttgcaacgcaaagtgacaattcatgcgaaaacttttatactttaagtaaaggggggcttcaacatgagcgttattcaagtaaaaggcaatgttacatacccgattacaattgatccgagtgtctggattttcgatgaccgcaaatttccgtttgaaaacaatcagcctgttcatcaggacggctctgcagaaacccaggagcatacgcttgatcctgaacgggtgatcagagaagggcgcatttcgccgccgactttaaaaagtgaaaaacgttatgaaaaagaaagactgatgaacggcagcttcgccatgaagctcggcgctgttttagcaaatgccgagccgaaagaaagcgctgtcctgtgcgcatttatttcaaaatcagaaagaaccgaagtgccgcttgaaaaggcgatggacgcaatcgcgcatttcagcgatgcggggaaaccgcttcaagacggcggtccggtccatttttacgtggacggagactttgaaaaaccgataacgggcgtcacagaaatcgaagttttataacaaatcggcggcaagctgtgcaaggccggatctctcacctttcacaagcttcacgctgccggagacggtttgtcctttaaaccgctctacaacataagcaagtccgttgtttaaactgtctaagtatgggtgatctatttgctccggatcgcccatcaggacaattttgctgccctctcccacccttgtcaaaagcgttttgacctcgtgcctcgtcagattctgagcctcatctataataataaactgatccggaatgcttcttccccgaatgtatgtcagcgcctccacctgaatcgatccgattcctgccaaaatcgcttcaagttcacccggctttttcgcattgaataaaaattcaagattatcaaagatcggctgcatccacggcttgagcttttcctctttttcgcccggcaaatatccgatatcctttcccaccgggacgatgggacgcgcgacgatcagctttttataaataccgagatcctccgtctgcagaagccctgccgcgagagcaagcaaggtttttcccgttcccgcttttccgatcagggtgacaagcgggatatcttccctcagcaggagttcgagcgccattgtctgctggacgttcttcggcctgatcccccatacgtgctcatcatcgaaaacgagtctttttacggtctctcctttcttatccgccatgccgaccgcagacgaagatcctcctaattcatctttcatcagcacaaattgattcggataaacctgatgctgctgaagctccttgactggaatttgtttgtttttataaaacgaggcaaaccgctctttattcataaatatatctttgtacccgctatatatttcatgatggtcaacgactctgtcgtttaaaaagtcctccgccaaaagcccgatggcatccgcctttaccctgacaagcacatctttgctgaccaggatgacgaggcggccgttttctttcgtttcctcctcaaggcttaaattttttgccaccgccaaaatgcggttatcattcgttttttcgataaaaatttcttggagctgatgaaatgaccggtggttcagttcaattctgagcgttcctccgctttgaagcggaactttctcgtgcagccttcctttctccctgagcccgtctatcagcttagatacgtgcctcgcatttctcccgacctcgtccatataccgcttttttgaatcgacctcttccagcacgacggcggggatgacaacttcgttttcttcaaaggaaaaaatggcgttaggatcctgcaaaagtacattcgtatctaacacataaattttactcaagtctcagcctcctgaaataaggatcaaagcccatcgtgtgcttctctttccgcgaaaaacggggatgcctgctaaaatatatgatttggtgaataaagatagaaggttaattcaacaataaaataaatgaaagcattcaaggagggaatctgacgtgcgaattcttttcattatcatacaagccttgtttatcctgaccggctgcactgctgtacaggacggccgcggccgcaatatccagaacgaatcaaccgatcagcgtgatgcaaaaccgattcatgtaaaaaatacggctcctgagacagctgaaaatcccggccggacagacatcgctaagcatctcgtcgaggtaaccgaaaaaatccccggcatttcagatgccaccgcggttgtactcggaagatactccgttgtcggaatcgatgtggatgacaatttagaaagaagcaaagtggagagcattaaatacacggtcgcccaggcgttaaaaaacgatccttacggcgccaatgccgttgtcgtggctgatcctgatacggtttcccgtctgagaggcatgggcagcgacattaaagccggccgccccgtttcaggcattttggacgaacttgccgccatcgtcggtcgtgtcatgccggaagtcccgaatgatgtgaccgacaatgaaaaagaatcaccgactcaatcgaatgatgatcagctgaaccaaagagaccagaacaagctgcagaacgaacagaacgatcaatcggatcatcatatgaaaaaccgccagtaaaaagcagcgcccgctccaaaagaagggcgctgctttctttccctttggcaggaggggcatccatgatataatgcttgtcatagtgaaagaggtgaaaatcaatgagagtaaaatgttccatttgcgacaaaattgaacaaattgatgatgaaacactgacagccaaacgcctccgcaatcgtccgattcatacatatatgtgccgggaatgccatgaccgaatcaaaatcaaaacggaggcgcggctgaataccggacacttttcctttcatcctggacaaaaagcgaaaaaagataaactgaaaaaataaaccgcaataaaaaatgacccgccggaaggcaaggtcatttttttattgcggtttagctgactggctttttttggactggtgcagacggattttgtaaatgatcaaaatcaaggcggcgacaacaagcccttctccgaccggcaaaaacacaccgaaaaaagtcagcacggtgcagccgagcacgagaaagagataaactgccgcagccttcaaaaccggcagccgtttggcaaagccgagtttaaatacaatcaccgaaagcacgacgatcgttccgtataacagccacattcccgccagcggatgctcatccacttggtaaagagccgcaaagaacgacagccgttcacttacttcattcaaaaagatccccctccccttttccgttcgggttctaccttttcaaattctgcaagtgattaagacattcctgctgtttttttctttttcgccgctttttcacgttcgtttttattcaggattttctttcttaaacggatggattccggcgttacttcgcagtattcatcctcgtttaagtactcgagtgattcttcaagcgacataatgcgcgctttcttaatcgtagtcgtttgatccttcgtagcggaacgtacgtttgtctgctgtttcattttgctgacattgacaacaaggtcattgtcacggttatgttcgccgacaatcatgccttcatacacttctgttccgggctcaacgaagatgacgccgcggtcttcaataccttgaattccgtaagatgtcgcttttccgttttccatggaaacgagcacaccctgacgtcggcctccgacttggcctttttgcatcggctgatagctgtcaaacgtgtggttcaggataccgaaaccgcgtgtcagtgacagaaactcagtagaatagccgatgagtccgcgtgaaggtacggtaaagatcaggcggacctggccgtttccgttattaatcatatcaagcatttcgccttttctcgcacccattgattccataacagaaccggtatgctcttcaggcacgtcaatctgcacgcgctcaacaggctcgcagctgacgccgtcaatttccttaatgataacttcaggtttagacacttgaagctcatagccttcacggcgcatgttttcaattaaaatggacaggtgaagctcaccgcgtcctgaaacaacccatgcgtctggtgatgcagtcggttcgacacgaagactgacgtcagtttgaagctgcgcattcagacgctcttcaattttgcgggctgtgacatatttgccttcacggcctgcaaacgggctgttgtttacgacaaatgtcatttgaagcgtaggctcatcaatgcgcagaaccggcagcggctcatggtggtcagccggacaaaccgtttcaccgacgttgatgtcttccatgcccgaaacggcaacaaggtctcccgctctcgcttcttcaatttccacgcgtttcaatccttggaaaccgaagattttcgttacacggaatgatttaaccgttccgtcaagtttcatcaatgaaacctgctgacccactttcatcgttccgcggaaaacgcgtccgataccgatacggccgacataatcattgtaatcaagcagcgccacttggaattgaagaggctcttcggcgttatctaccggggcagggacatgttcaagaatcgtttcatacagtgattccatgttttcgtcctgctttttcggatccagacttgccgttccgttaatcgcagaagcgtagacgacagggaactcaagctgttcttcgtttgcgtcaagctcgatgaacaaatcaagcacttcatcaatgacttcttccgggcgggcgaaatcacggtcgattttgtttacgacgacaaccggatttaagttctgctcaagggcttttttcagtacgaaacgggtttgcggcatgcagccttcataagcgtcaacgactaacagaacgccgtcaaccattttcataatccgttctacctctccgccgaagtcggcgtgtcccggagtgtccaaaatattaatgcgtgtatctttatagttaatcgcagtatttttcgcaagaattgtaataccgcgttcacgttcaagatcgtttgaatccattgcgcgttcggcaatattttcgttggcacggaatgttccggcttggtgaagcaattggtctaccaaagtcgttttcccatggtcaacgtgggcaataatcgcgatgttgcgaagatcgtttcgaagtttcacattttcatctcctaaaaaaattagataactttcatattataccacacatcctctttaaaagcgttacgtttttctgtaaactgaaagtatgacgttaaaggggatggaaatatgaaaaaattgaattggctcttattattatttgcattcgcagcagtcttcagcatgatgctgatcggcgtatcaatcgctgagaaaagcgcatggggcatcatcggaagcattgttctcgttatcgccatgatgggaagcggtttcaccgtaaagaaaaaaatgcgcgaacagggactgcttgattaaaagcatgaccctttgcaaaattccgtaaacatggaaagacaatatcttatgaagcctgaatcaaagattcaggcttttttacctcctcaaaaacagactccagatgtaaggcttatctcccccgccgtctagtcaggaagccgggaatgacggcccccattctagttacatcagcagattccctcagaatatacagtctgaaatagtccggcatcgttatgcagaaaataccatacctcctatatcaattccatcattgtctttttatacttgtgactgtaagcaaatacacatgacaaggagagaatgaaatgaaaacatcttttttgaagaaaaccgctgtaactgccgccgcaaccgcctcagccgccttgcttgcattcagtccgcttgattctgccggcgcaaaaacgatccaggcaaatgaaccgcataccctgcaggtttccgcagagaaaacaccggaagacgcggcaaaactcattgacatcatcagccaatcgatttacgaaaaagacggcgtctattattttgacggtgaaaaagcggttgaattgggattagataaagaagccgcacagaccattcaaaagctgtgggacagttcaaccgaatttttaaccgttctttctcaatgtattgagaaaacggacggcgaatatacatttaataaagaaaaagcggtggagctcggatttacggaaaaagaggcccttatcgttgatcagctgttcaccactttttcccaaagtcttcatatccttcaatctgcgctgattgaagaagacggtgtgtatacgtttgatcaggaccttgctgaaaaagcaggagcaggaaaaaaagaagcaaagctgtgtgccggattctttaattcactgcctcaggacttgcttgaaggcatttatacagcctttcatccggctgagtaaacggataaaacgcccggtcatgtcatgcagccgggcgttttttttaatcagcagtttaaagatcagcatgataaagaaaacagcgccgaacaaacaggctgcttttatcagcagcttcccgtaataccgttccttaaaccgcctttcttcttctgcataacaggcgggctccttcatctcggggctgccgaggtcaagcggctccttcatcatatgatataaactttcgcacttaccgcatgattcaaggtggcgggaaataaaccgctccgtttctgtttcacaatcgccttcaatatatatagggagtaaatctctcactaaacagcaagtcatatctgtccgtccttccttttttccgctaagtgctgtttcagctgcattctcgccctgtacagagtgctcttcaccttcgaaagactccagtccaaaacatcagcaatctcttcgtaagacagctcttgaaatatctgtcgaaatgctgaataaaatgactgaaaatctctgacatctgaaacaatccttttcgtttattaaggcctcacctgtttagacaaacggctataaaaaaagttttacagatcggaacatttttcctctattatttctcccgacttcatttgtcatttttttcagaataaatcgcatcattcgactcatgtttgattcaacacgtgcctctcggcttatcccctgacgctgcccgcctgaagcctttacgggacgattctatcaattcatcagcgaagtctagttttatattgcagaatgagagaatgctggtttattataacaatataagttttcattattttcaaaaagggggatttattgtgggtttaggtaagaaattgtctgttgctgtcgccgcttcctttatgagtttaaccatcagtcttccgggtgttcaggccgctgagaatcctcagcttaaagaaaacctgacgaactttgtgccgaagcattctttggtgcaatctgaattgccttcagtcagtgacaaagcaatcaagcaatacttgaaacaaaacggcaaagtcttcaaaggcaacccttctgagagactgaagctgattgaccacacgaccgatgatctcggctataagcacttccgttatgtgcctgtcgttaacggtgtgcctgtgaaagactcgcaagtcattattcacgtcgataaatccaacaatgtctatgcgattaacggtgaattaaacaacgatgcttctgccaaaacggcaaacagcaaaaaattatctgcaaatcaggcgctggatcatgcttttaaagcaatcggcaaatcacctgaagccgtctccaacggcaacgttgcaaacaaaaacaaagccgagctgaaagcagcggccacaaaagacggtaaataccgactcgcctatgatgtaaccatccgctacatcgaaccggaaccagctaactgggaagtaaccgttgatgcggaaacagggaaagtcctgaaaaagcaaaacaaagtggagcatgccgctgcaaccggaacaggtacgactcttaaaggaaaaacggtctcattaaatatttcttctgaaaacggcaaatatgtaatgcgtgatctttcgaagcctaccggaacacaaattattacgtacgatctgcaaaaccgacaatataacctgccgggcacgctcgtatcaagcactacaaaccagttcacaacttcttctcagcgcgctgcggttgatgcgcattacaatctcggcaaagtgtatgattatttctatcagacgtttaaacgcaacagctacgacaatagaggcggcaaaatcgtatcttccgttcattacggcagcagatacaataacgcggcctggatcggcgaccaaatgatttacggtgacggtgacggctcattcttctcgcctctttccggttcaatggacgtaacggcccatgaaatgacacacggcgttacacaggaaacagccaacctgaactatgaaaatcagccgggcgctttaaacgaatccttctccgatgtattcgggtacttcaccgatactgaggactgggatatcggtgaggatattacggtcagccagccggctctccgcagcttatccaatccgacaaaatacggacagcccgaccattacaaaaattatcaaaaccttccgaacactgatgccggcgactacggcggcgtgcatacaaacagcggaattccgaacaaagccgcttacaacacgattacaaaaatcggagtgaaaaaagcggagcagatttactatcgcgcactgacggtatatctcactccgtcatcaagctttaaagatgcaaaagcagctttgattcaatcagcgcgggacctttacggctctcaagacgctgcaagcgtagaagcggcctggaatgcggtcggcttgtaaacaagaaaagagaccggagaaatccggtctcttttttatatctgaacatttcacaatggcttcaccatgatcatatatgtcttttcccgatcgtctttttcaagcttaagctgttcaaagccgcattggcttaaaaacaaaacccattcctgcctgtccaggggaacggctgaaaacatcgctttatgctctcctctcagccggcccgcaatctcttcaatgaccgcgcgaccgattcctttctcttttgcctccggagcgacggccacggttccgagccacggttttccgtttgaaggcgcccattccaaatgaaaactgacggcggcaggagcgccgtcaatctcccatacgagccacgttccattgtacatggagtatgcaagcataaactccgccgcattttttgttccgaactcttcgtttttccacaccgggtgtgatgccgccagctgctccagaaacccgagatcttcttcttcaaaatctctacctgtcagcatgtaaatagtcgtcaaagataattttatgtatagccggattgcccgcaagcacgctgtggttgtctaaaaacgtgaacggttcgccgtctgtggtcgtgtaaatgcccccgacttcgttcagcagcacgcagccggcagcgtaatcccacggcgcgagcctcatcgtaatgtatgcgtcaatgcggccggccgcaacaccggccagctcaagtgccgccgaaccgtaggaacgcgttcctctgacccgttttacgagcggcgccaaaatactcgggtcaatccttctgttttccgtcacccatgtggcattgattgcaataatggcttcttcaatggaagcttcttttaaaggagcaagcggcgtatcattcagataagccccttttccgctgaatgcgtgatacagttcgtcctgcatcacatcataaattaagccgattttgccttttccgtcttcaaagatgccgatggagatcgcgaaatgccgcttttgatggacaaaattcatcgtcccgtcaatcggatcaatgatccagacgattccgtcaagggagcggagtttatccccctgcccttcttctccgagaatccggtgtccgggaaaagttccttgtatacggtcaatgaaaaagcgctccgtctctttatcaatatttgtgactaaatcattcggatttgattttgtttcaatcgtcaagctttcctgcatggattgtctgattctcgttccggcttcttttacccattgttttgcgatatcatcaatttccgtccaatttgtcataccgtgtacctcttttctatgtatagcttattctatagcatactgataaaggcgatgaaaaagcaaggaaaatgaaaaaaatgccttctcacgtaaaaacgaaccatttcctgcggttcgtttttactattctttatccgttaagccgaatccattcttttctgagacgttccagttttcttttgctgagatcgatttgatcttcattctctttttgcatggcctcgtacagggttgccaattcataatcaacctctagtctccagacagctacacggttatttttttcctccctgaatccttccttcaccacttgcctcattgtctttcgccccttccagagatcatttgttaaaaaagcatcccatttttccaattcattaatgatacttcttatatcgtatggaaacttatattcggctgtaacaacattcttaaaattgtgtgtttacctattcgttttttaccaccattcctctcgactcaaacgttctcaatgtttttgcggcgggcggcggctgtggtaaaatatgaatacttacgttaaggaggaaaaagatgactcagatgcgttttacaaaagaagacttcgatacatttacaatagaaggtttagatccgcgcatggaggtgttaaaagaacaagtccgtccgaagctgaccttgttaggagagcatttcgcaccgacattgtcagcattgacaggagatgaaatgttcccgcatgtcgccaagcacgcgagaagatctgtcaacccgccggctgacagctgggttgcctttgccaacagcaaacgcggctataagaaactccctcactttcagatcggtttatgggacacccatatgtttgtatggtttgccatcatttatgaatctccgataaaagaggaatacggcagattgctggaagcgaagcaggaggaaatcacaaaacagattcccggtcattttgtatggtcgccggatcatacgaagccaggtgcgtacaagcagtccgacatggatcaggagcagctgaaaacattatttgaacgcctgcagacagtgaaaaaagcagagcttttatgcggcattcagctgcaaaaagaagacgtgatcaacatgaacaacaatgaattcctgcaaaccattgaagatgcttttaggaagctttcctttttatacacactgactcagaaagtctcataacataaaaagcgggccgattgccggctcgcttttgtctacattttgataatcgcttgatctgattgtttcgcctgtttcacagtccgatacggggaataggtgctgtcagcttcaaattggctgcagattttcttttcttccgctttcccgggaacgatttctttaaagcggcggtacgcattcagaagtctgtctcggtcagctcctttttcataggcgttttccacctgctgaaaaaaagcaatgacatccacggcctcctctgtcgtccagtcctcattcatcggatattgatattccaaatgtcttcactcctttatcatcatgctcaaaaataagcatcttccatagatcataaattgttctttactttctttcaagttcataatataattcatttgttttacgtttaaaaaacgggtaataaaactgaatgtaatacaaactaatccgtaggtattatgataaaggtgggaaaacaattgccgcaacatgaaacacccctgtacagcggactgaaaaagcacgcggacagacagcctgtccaattccacattccgggccataaaaaaggcgcgggaatggatccggaattcagacaatttatcggagaaaacgcgttaagcatagatttaattaatattgaacccctggatgatttacatgcgccaaagggcatcattaaagaagcccaggatctggccgcggaagcattcggcgcagaccataccttcttttccgtacaagggacgagcggcgccattatgacgatggtcatggccgtatgcggacccggagataaaatcatcattccgagaaacgttcataaatccattatgtcggccattgtattttccggagcggtgccgatttttatacacccggaaattgacgatgagctcggaatttctcacggcattacgcttgagtccgccgagcgggctttgacggaacaccctgacgcaaaaggcctgcttgtcatcaatccgacatacttcggtgtggcagctgacttgagcagcattgtaaagctcgcgcattctttcgatgtgcctgttcttgtcgatgaagcgcacggcgtgcatattcattttcatgataagcttcctctgtccgccatgcaggcgggcgctgatatggcagccacaagcgtgcacaaattgggaggctccctgacgcagagctccattttaaatgtgagagaaggccttgtttccaaagaaagagtacagtcgattttaagcatgctgacgacaacgtcaacatcctatctgcttctcgcttcactggatgtcgcaagaaaacgcctcgctacagaaggccgcgatcttcttgaagatacgattctgctggcggatcagacacgggaacgcctcaatcaaattgaaggcatccgctgtgtcggcgaagaaatcactgggtcaaaagctgccttcagttatgatccgactaaattaatcatttcggtcaaaaacctcggcctgacgggtcatgacgttgaaaaatggctccgcgaatcatttaatatcgaagtcgagctgtccgatttgtataatattttatgtattttcacccccggagacagagcaggagatgccgaccgtcttgtaagcgcgcttacagacatttcaaagcaggcttccgcaaatgattatgctcatcagcaaacggaagttctgcttcctgagattcctctgttagcgatgacgccaagagacgcgttttacgcaaatacggaagtcattccgttaacagaatccgcgggacggatcattgcagagtttgtcatggtgtacccgccgggaattccgatctttattccgggtgagatcattactgaagaaaatatcagctacatttttaaaaacttggacgccggccttcctgtgcagggtcccgaagatgccacgcttgaaatgatcagagtcatcaaagagcaaaaagccatccaataaacataaagaagcccgaaacgaaatcgtttcgggccttttttacgctttttactcttcttcaagatgacactggcattgtccgcagcatgttccgtataacgtcgtgaccttctcatcctcaaagtaatgaatcgcttcgttacagtcttggcaaacaattgtacccatctgtcattccccatttctcagaatttgaaaacgcttaatttttacttgttgttattatattattatgtcacatttaatatgtcaactgataaattgtataacacatttattttttacggtctttttatagctcgagggttaatcacggtatatcctttatgacgcaatccttttacaatgtccggcatggcttcagccgtccatttccggtcatgcatcaatatgttggcgccgtcccgcaggtaaggactgctcagtgtgatatcggtaagcgcttttttggattgatatttctgatcccaatcatacccgaaggtccagttcattttcaccataccttctttttttataagtctgtcactgtagtccgtattgcttccgaaaggcgccctgaaaaatgcgggtttctctcctattaccttttcaaccgctttattgacgccaatgatttcttcccgttgtttttgttcggaaagatcttttaagttttgatgagtcattgtatgatttccgatcataaaacctaactcatgaatatgcttaagcgctttcttattttcatcttttttcaaaaaatgtccgtttacaaaaaagatcgctgacgcattgagatcatgcagtttgtccgcaatctcagcggcatgctgatcaggcgcgtcatcgatcgttaccaatgcgatcggttttttctctttctgttcatccattttttccacagaaaaggttttcggattgatatagtaacggggctccgccttctgttttttctcttttgtatgatggttttcccgtttggcatgattggccgcggcttgagaatggggtttgtttgtttgcatcttttcatttgattggcagccggcgagtaagcacatacatatgacggctgcaatggctttatacatgcaatccctcctgatatggttttgcccccagtataacgaaaaaacagcgctctcacgaaaaacaatgtgccttttttacacatcggctgtgcaagttgtcacacgtattatttcttcattaaaaacggtttcaattatataacaattcagtaacaagccttaggtttttcacctctcgtgatacacttaatatagtccttataaatggatgaaccaatatattatataaaacagaggagtaagatagatgcgctaccgtacggtgattcccttttttttgatgctgttcgttctgtcaagctgttcggtttctactgtcattccattcaaaaataaccggatcgacagcattcatcacactcaaatcttgtttttttccgatgaaaatcatatagataaagaagttccttattacgatgcgattcttgatttagaaaagaaatatccccatcatgtcgatcaaatgaaggtttatgacaacagaaagggatgggaagaggaaatcaacacgttccctgcgctgatggtgatcaatcatcggcatgtggtcatgaagattgagggatccgtaaagaaaaaagaggatatcatcaaacctatgcagcatgtgcttgcacaataaaaacagcccccgcttttacaaacgggggctgtttctttgttacatcattattttacgatgtggatcgggcttccgattgctacttcggcagcttccatagtgatttcgcccaatgtcgggtgagcgtgaattgtcattgcgatatcttcagcagtcattccgccttcgatcgccaggctcaattcagaaatcatgtcagaagcgcttgcgccggcaatttgcgcaccgattacaagaccgtcttctttacgggtgatcagcttcatgaagccgtcagtttcgttaagagacagcgcacgtccgtttgctgcaaacgggaacttagctgcaacgacttcaatgccttcttctttcgcctgtgcttcagtgtaaccgacagaagccagttcaggctcagagaatacaaccgccggaataccgaggtaatcgatttcagccggctctcctgaaatagcttccgcagcgattttaccttcgtaagacgctttgtgagccaaaggaggtccgtcaatgatgtcaccgattgcgtaaatgttcggtacgtttgtgcggcactgcttgtctgttttaatgacaccgcggtcagtcatttcgataccgacttgctcaaggccgagctcatcagtgttcggacggcgtccgacagtgattaatacgtaatcagcatcaaccgttttttcttcgccttttacttcgaatgtaactgttacgccgtcaggtctttcctcaacgcctttagccatggcgcttgtatggatttcaacgttgccttttttcttcagtctgcgggtaacgagagaactcatttgtttttcgaagccaggaagaatttcatctccgccttctaaaataaccaattcagttccgaagttcgcatacgctgttccaagctcagtaccgatatatccgccgccgataacaacgagctttttcggaatttctttaagcgccagtgcgcctgtagagttcagaacgcgttcgctatatttgaagtttggcaattcgataggacgagaaccggtagcaatgatcgcgtttttaaatgtgtatgtttgcgcagagttctcatccattacgcggacagagttgctgtctacgaaataagcttccccgtttacaacgtccactttatttccttttaaaagacctgcaacaccgccggtaagcttatttacaacagaagctttccattcttggacttttgtaaagtcaaccgttacgttctcagcagtgattcccatgtcatctgaatgttttgcattctcgtaacgatggcctgcattgatgagcgcttttgaaggaatacagccgacgttcagacaaacgcctccaagagttgctttttcaacgactgttactttttgtccaagctgagcagcgcggatggcagctacatagccgccgggtcccgcaccaatcacaagagtatctgtttcaatagggaaatctcctactaccataacattacgcctccattaaaataagttgtggatcgttcagtaaacgcttgatgtggtttaacgcattttgtgcagttgctccgtcaatcatacggtggtcaaagctgagagaaagagctaagacaggagcagctacaatttcaccgtcacggacgatcgctttttcagcaatacggccgataccgagaatcgcaacctctgggtggttgataaccggtgtgaaccattggcctccggcagaaccgatatttgtgatcgtgcaagaagcgcctttcatttccgcaggtgcaagcttgccttcacgcgcttttgtagcaaggctgttgatttcatcagagatttcgaaaacggctttacggtcggcatttttcactaccggcacaagcaggcctttttcggtatccgctgcaattccgatgttgaagtaatgtttttggatcacttcatctgttttatcatcaatcgatgtgtttaaaacagggaattttttcaaagcggatgttaatgctttgacgacgtaaggcagataagtcagcttgatgccttgatcagcagcaacttgtttgaactgtttacggtgagcaacaagatttgttacgtcaacttcatccataagagttacgtgcggtgcagtatgcttagagttcaccattgctttcgcaatcgctttacggataccgctcattttttcgcgtgtttcagggaattcgccttcaggagcctgagctgctgcaggtttagctgtttcctgaggtgcagctgtttcttgcggtcccgcttcttgagccgctcctccatttgcaaagctgtcgatatcttcttttacaacacgtccgttattgcctgaacctgttactttacggatatccacgcctttttcacgggcatatttgcgtacggaaggcatcgcgatcacgcgtttgttcggatcagcttccgcttggtcctgctgtcctgcgccggtttcttttgcaggctctttaggagtctcttctttagagatatcctgccctgcttcagcagacgactgaacttgagcctcagttttcgcctctcctgaatcatggcttcctttaaattgaagatcttcgtaaccaggtgcgtcaaacgtaataatcgtttgtccaacagttgcaactgttccctcttcaacttttaattctaatacttttcctttaacaggtgaaggaatttctaccactgctttatcattttgcacttcagccagaacatcgtcttcttctacctcgtcgttcggcttcacaaaccattttacgatttcgccttcgtggataccttccccgatatccggaagtttaaattcaaatgccacagttttcgacctcctagttgattaagcaaattttagttatgcatacgcaagcattgaacctagtaaacagactccttcatcataagagaaaaggactctctttaccgtcttttaagatgcctgattaaaattcaagaacttttttcgcagtttcaagaacgtctttatggtttggaagccatacgctctcagcaagcgagaaaggaaatactgtatcaggcgccgcaacacgcagaaccggagcttccaggctcagaatcgcgcggtcattgatttcagctacaacgttggcagcgatgccggcttgtttttgagcttcctgcacgacaattgcgcggcctgttttttcaacagaagcaataatcgtatcaatatcaagcggacttacagtgcgaaggtcgataacttcagcagaaacgccttctttttcaagctcttcagcagccttaagcgactcatgaaccatcgcgccgtatgtgatgatagaaaggtcagtaccttcgcgtttcacatcagctttgccaagctcgattgtgtattcctcttcaggaacttcctgacggaaagaacggtaaagtttcatatgctctaagaaaacaaccggatcattgtctctgatagaggcaatcagcagtccttttgcatcgtaaggagtggaagggataacaactttaatacccggctgctgagcgataaggccttccaaactgtcagcgtgaagttcaggtgtatgaacccctccgccgaatggagaacggattgtcaccggagaagtccagcgtccgccggaacggtagcggagacgagccatttgtcctgagattgaatccattacttcatatacaaatccgaagaactggatttccataacaggacggtaatcttgcaggcctaaaccgagagcgagaccgccgataccggattcagcaagcggcgtgtcaaatacgcggtcctcaccgaattctttttgaaggccttcagttgcacggaatacgcctccggcaacgcctacatcttccccgaaaagcagaacgttttcattgtttttcagttctgtgcgtaacgcatcagtgatcgcttgaatcattgtcatttgcgccatggcttacttcgactccttcgctttgtaaatttcaagttgttctttcaagttgaacgtcggctcttcaaacatattctcaatcagctctgttactttcggttttgattcgccgtcagcctttttgatagcttgtttgatttcttctttggcctgttcaatcactttgttctcttcttcttcagaccatagtcctttgttttccaagaacttgcggaaacgtacgagcgggtctttttgctcccattcattttctatttctttcgtacggtatttagtcggatcgtcaccggacattgtatgaggtccgtaacggaatgtaagagtttcaatcagagtcggaccttcaccgttaattgcgcgctggcgtgcttctgcggttgcagcgtaaacggctagtgcgtccattccgtctacttgaacacctgtaataccgacggcaactgctttttgggcaattgtctgtgcggatgattgcttttctacaggagttgaaatcgcatagcggttattctgaacaacgaagatcgccggcgctttaaatgctccggcaaagttcattccttcatagaagtcaccttgagaagctccgccgtcaccagtgtaagtaatagctaccgcttttttaccgcgctttttaagccctaaagctacacctgcggtttgaataatttgagcaccaataataatttgaggtgataaagcgtttactccctcaggcatctgattacctttaaaatggcctcttgagaacaggaatgcctgatgtaaaggaagcccgtgccaaatcagctgaggaacgtcacgataacccggaaggataaagtcgtcctgttcaagcgcgaagtgtgatgcaatttgagaagcttcctggcccgctgtcggtgcatagaaacctaaacgtccttgacgggaaagagaaattgaacgctggtctaaaatgcggatatacaccattcttctcattaattcctttaactgatcatctgaaagatcaggcattgcgtctttatttacgacttctccttcagcatttaaaatttggaacgtttcaaactgcttattaatagcatcaaattgttttttgctatcaacaattgaagtttttgtctttgcagccattttttaaaccacctcttcttttgatttaacagggttaggataccgtttagccatccgtattaaaaacagtcttatcatgctctgcaattctaaaattaatcattcagaaattcacatagcgcttaagcaaagataatgacgtttaaactgtactaataaaaaaagattttttattagtacaatatgatcaacaaccatagtttacagtaattaaacaaagccgtcaattatttataaccttattttgaaaccgcttataaaacttaagatcatactgcgccaaactgtactataaaagactttaaactgtattataaaaacgctctactgtactataattaaaaaaaattacaaagagtaaattaagttatttaacttcgagggcaggctttgagaaggtgccgcgggataaaaacgggcagttagcaatcgtcccgcctgccgaacaggcgggacgatgcttttgtctaattattcaatacccgcccacacgatattcagcggcgtcagtacggcatgaggatgaaactcggaaatcggagtgaaaaatacatacgtaaaatcttcggctggatcagaaaacatgccgcaccaacccattccaagatgtgagaacgtgccttctgtcatgaaataatggtcaccggccggccacaaattaatgcctaaaccaaagccgccctcctctcttggcgctccgaagaagtaaaaaggaagaccgggctttatttgatttctcagcatggcctcgactgtttttcttccaagcagcttcttatctttcaatctgcctttatttctaaacatttcagctaacttccaaatatcttccaatgaagagtacagaccgcttgtcgctttattcggaaaatacgggtgatgacttttttccagctgtacgcactcgtgctcattgatcacacaaacttcttcttttaaagcatcaggcacataaaaaaacgttctttctaatccgagcgcttcaataatatgctttgttacatactgttcgtaggacatgcctgttactttggaaataatgatgccaagtatgacaaagccggttctggaatagttccatgcttcatccactccgtactctaaaggcgtactgaccagatagcttatccattcttcctcattcgttaagtcaatgccttcagccttttgaatatccagctcaaaacttaatcccgccgtatgagtcaaaaggtgtaaaattttaatgtctccgaaacccggtttatcaaatgcaggcaaaatgagcttgaccggcattttcagatcgagcagacctttttcgacgagctgcatgacggctgcagcggtaaacacttttgtcaaagaaccgatttctctgattgtatcaagctgaaatgtttgcttttctttttgtccgccggtaaattcccctaacgactcagccgcaaaaacctcgcctcctcttgatatcatataactcgcgcattgcagatctccattgtctatcatcgtctgataatggctgttaagagcgttaatttgtttcatatcaaatgccggattgcttattgtttgtttcattgttttctccccctgtactgtatgtatcgttttcatcccttacttactgatttcttgatgaattctgacaccgctttattaaattcttccgggtgtgtgatgttcggaagatgccccgctcccttaattttctttaattctgcattgctcagcagtttcttcagcctttttgtttctttctgatcaactacgctttccttctctcccgtaaggataagcgttcttgtataaatgtcttttaaaaagccgatcgtagaatagccttcttgttgatgtatcttcataaaacgttcaatagaagcatttaagaattgattcctgtataaactttcatattcatgcgattttcctatagctataaaatcatttttcagtttttcctcaacactgctttcagggtcttcttcgtattcggtgtaacttccggaaagaatgagtgtttttactttttcagggtattcataggctatcctctgtcctatcatgcctccccaagaagctgccgcaatgtggatcggccaagcaacccctatctcgttcagcacttcaataaaagtctgagccagcccgctcagtgtaaaatcggcgctcccctcactcagcccgtaacccggtgtgtgtatgacaattacattaaattggtctgcccactccttcatttgttctttccacatgtaagcagtggtagcaaaaccgcaaatcagtaaaattgtttcacccttaccgctcatcaatatttccatatgccgggcattttctgtgttagccagaaaatgaacggtttccgtttcttctgtctggtaaaaagcgatgagtttttttgcggcatcgctttgatcgtgctgaagggctcctttcttcagtctgctccaataatgcaaataatcgtctagatgacgattggaagctgtgccgagtattcggaaaggactttcagcttcttcttccgtaacgattgacgaagcatcaaaatcggctgcaatcgctgaatctcttaccagaggcggtgctgaacgggcggataacggattgaaattattttgtattttttctttttctccgtataacacgatcagctggtggccttggccgagaagcgagtgttcaaaagctttgattccggcagtattttctaatgggtgaagtccgtactcggttttcataatgtcttgaatgccggcatcaactgacatgcctccgtctttccagaaaggccaatttacagcgatggtttttcctgatctccccccctcctttctcatacattccctccactcggcaaaatgctccagaaaacgattggcgtaggcgtaatcagcttgacccaaacttccgatttctgaagagatggaagaaaacaaaacaaaaaagtctaaaggcatatttctgagcgcttcatccaaatgaatcacaccattgacctttgattgcagcaccgcctgagcttccgcgtctgttttattcataatgaaagagtcttttaacacgcctgcactgtaaatgaccccgttgatttcggaataatcagcatgaattttttccgctaaattgatgacctgctgtttatctgacatgtcagcctggatgtaagaaatgtttgccccgtcatatcggatgctgtctaatttttcttccatttctgctgtcattttcgatcgtccggcaatgataacgctggctccgtgatttgcataaataaacgctgaaataatccagccgatgccgcttaaccctccgattatgagatacactccgttttttacaaactttgcggccttttgccctggttgcagcgaagcatctttgtatgctgtcacccgccttttttgatcgccgtcatatttcacagcctcatgatgtccggcacttaattcattgagaagcaaagatgctttttcaatggtttgtcttgaagaaatctcaaccgttttacactttatattcggctgctccgcattaagcgttttaaaaaagcctccaatcgcggcgtaaatcggatttgtatattgatccttgtcatgtacgtacaaaaggttgatgttatcttttattttttgacggatcaacgctttacttaaataaaggattgaataaaagctgtgagtcaaatctaacgctgcctcagtataagcttgttttgacaggtaatgaatgattgacgccggaaacgctccggactttttcatatcatctaacagtctggtgtaatgagcagactgctccggattaaatttataatgcttttcatttaccatttcatattcagcggcggcttccgcataaataacattttcactgccgatgtactttcggatttcatcactcaatgaactgccgaaatcgaaaatcaatgtattttccttaggcacttctccggactttaatggcgattctatccattctttttgtaaatataaagattcaagcatcggcttttcagacggctctttcgtttgcgttttttctttaaaagctgcggccggcgtattacgcacatcatatttttcttctaaataagctgctaaatcatgaatattgttataatcaaaaagcaatgtcggatacaattgtgtatccaatctttcctcgagcattttcgatatatgcagcagctgttttgagtcaagacccagttcgtaaaaagattggtgtttgtccgctttatttggcggcgtgtttgtcacatctccaataatggatgacagctcatctgttaatgttttttgactgtcttggtgctgaactgtatcagagatagagtctgtaacgcgagctccgtatttctcctgcagatattccgtcaattcaccgattgtggagtaatcaaataataaagtcgggtacagctttgaacctaacaacagttctaattttttagataagtctaataactgtttagaatccaagcccatctcgtaaaaggaaatatcattcttcaccgtttcagcaggcttttcaatcatgccggctatctcttggattaaattatttctgatcatttctttattgttcgttacgctgccgacgtctttagctttttgggaatgctccagcctttgtattgatttttcatttctgactcttttcacaccgaatcgctcataataaaaagcaagctctccatcaggcctgtatacttctatgtccgcatataaaatgtctttagaaggcggctgcgttatactgtttttatcaatatacacaaaacaagacccggttgttttatgcagtgcccggaatgtctcaatatatatagggataaacgcatttgttccttcatccggcaagtctgatgtaaggactcccaacaggctgagagatccatccaaaaatgcggggtgcatgtaaaagtcatctgtatattcttttgaaagtccgcttaaactgacctctcccagaatataattttcaccttcatataccgtaccttccaatttcataaaatctttatgaatcaggccgcccctgcgcaaattacgataggcggcttcagcattcgaagtccggacggcccctttctttaatgcttcgattgaaattgtcttttcgtctatcgcattttttcttatgatttccgcctgcaagttgactgacgcttcaccttccgccttttcagcgacccatttcctgcttgttgtttcaacaagccagccgttttcttgttccgtaaactggaaggtgacttttttatcaaaatggactgacgtcgcaacaggttcacggaataaaacatgtttgatttcaaaacttcggggtgatatccctttctcagctaaaaatcgtgttattaaatccagatacgttacgccgggtatcgtacgcacttgatgaaggacatggtctgaaacaatataatcgtcatgtttgactaatacgctgaacctcatgcaactcgacaacctttcttcttttacaaagtaaagaaacagagcaggtgctactctgtttcatcaataatttcaagaagccgttttttattctgtttgatttgtttttttcgatttgaatccggccagtactcttttctgacaaactcggcaggcggcagcggagttctgacggaatgatatgaatcatccaggccgcttaccaaaaggtgggcgtttgttccgccgaaaccgaaagcgctgatgcccgccctccgttttccatccttccagcttctcagttctgtattcggataaaaaggcgacttttcaaattcaaagcggggatttggcgtttcacaattcaatgtaggcggaatttccttatgccatattgataaaatcactttaatgaaacttgccgctccggcggcgcttaataagtgtccgatattggtttttacacttcctactccgcaaaattgcgttttgtttgtgtctcttcggaatacttttgtcagagcctgaagctcaatcggatctccaatcatcgtgcctgtgccgtgagtttcgacgtagctgactgatccgggagtgatatcggctctttcaaatgcatcttgaataacctgctcttgaagcttaggattcggagtcgtaatccccattgtcgcaccgtcgttattaatagctgatgcttcaatgataccgtatatccgatttccgtcagcttttgctttctccagcggttttaaaagaacagcgccaaaaccctctccgggtacaaagccgtttgccctttcatcaaaagtaaaacactgaccgtccggcgaaagagctcctccttctgttaacatcaggtaaggaatttcatccaaaagcagatccgcccctcctgccagcgccatttctgaatcaccgttttttatgctttggcaggctaaatgaatgctgactaatgaagaagaacaagcggtatcagacaccatgcttggaccgtgaaaattaaagaaatgcgacacatgtgaagcaataaagttttgactaagcccgacgatgtggctgctgctttctttcggcagtttgtgaccgtagccgcccattctggaaccgacaaatacgccgactttttttcccgataattctgtttcttcataaccggcatcacgtacagtctgtacactcgtttctaagaaatgtcttatcagcggatccgtttggatggctttctcctcttccatacggaaatactccggatcgaagctgccgattccattaataaatcctccccatttgctgatgctttttcccttttgctgcaccggagagtaatgttcttctatattccaccgggaatcaggtacttctttaatatgattcttcccttttctcagattgtcccaaaattcctctttatcagccgcgcccggaaacttacatccgattccgataacagctatctttgcagtggaagccgtctgcggttctgtatttcggctcgtcacagactgcatatcatgctgattgctgctttgagaatcagtctgttcgatttgttttttcaacggcggcgccgtcttaccgatatattccgcgagaccatgaatcgtgttgtgttcaagaagcacagtagggtcgatttttttctgaatcattgcttctatacgatgtataatgctgacaagaagtatagaatccacaccgtattcctgaaaatccgtatttgggttaagcttttcaaggggtatgctcaattcctcggcaaatacggcagaaagttcactgacaagcccttctgaatgatcaaaagtgccgggagtctcctgtcttcgggccggaaatgaagtcttgccggttttattgatgttcaggagactgtctgcatgaaacactgttccttttttcacgataggaatgatattggccgattttttctccagtgcatgatacaaaatcgccagtccttcccgcgtggatagagagtccaatcccaattcatcatataaaggactcgtcacagtacccattccgacttctttccagctcggccaattgatggacgtgaaatacgttctccccttttgaaaatgataagccgcgaaatagtccatatatgcatttgcagacgcgtaatcagtcattcctttcgacagtttgggtgactgtgctgcaattgatgaaaacagaataaagaaatccagcggcctattattaaaaatccgctccaaattctgaagtccagtgactttcggcccgtacaccgtcttaaattcactcattcttttatgaataaaggccggatttccgccgctgtgcagtccggcacagtgtatgacaccgctaatatctttaaattcaaggcttacttggtgaaagaatgaacgaagcttctcttcatttgtgagagaaccgctgtaatacagatagtcgacacctttttcttcaaaactttgaaacagttttatattgctgactgtcttttcgtcctgtctgccctctttcagcaaatgatcccattcacttcgcaaaggtaatggacgcgtacccgtcagcacgagttttttcactccccgtttcaccaaatcttcagctattgctctgccaatgccccctgtcccgccggtaatgacgatggctttatccgcaggaaatgaaacaggaccgccgccggtatcgattctttcttcttcaaaatacggaacatatctgacgccgctgcggtagcatacttcattctctcctgtacattgcgccctttcaatctcaaagatttgtttcagcttatgcgtttctttcatgctgtctatatctattgttttcacatgaacaaagccgtattccgcagaaagggctttcagaaaagcagctgattctgcacccgtcagctttggtttttccgctttaaatacctgcaagccattggttagttgtaaaatggataatggtgtttccttttttctccgcttaattatttcttgtataaataagaatttaccatatgggatgccgttctgattttcactctggtttccgatatctgagaaatcaaatatattttcgacctgccgctcaccgcccgagaagatctcacagataacgtcgtatgcgtggttttcatctaataaagaacactcaaacatttgatcagagtgttttatatatgaagagtgatgttttatgacaatcagattctcctgatctatatccggacaaatggtgcgggcaattgattctgtgtcttgattcacaaatgcgactgtcagtccgtactcttttgtttcggatggatttacaaacggattctccctccattttttttgcaagtgatgttgagaagaatgctgagggatctctgtcctctcagtcctggacggaacccaataacgttcttttgcaaacggataagtcggaattgagatccgtttacccggctgctgtaaatgttgatgaacggatttccagtcgatatccgccccccaaacccataattgagccagcttttccgcttcaccgttctcaataatggtctttacaaacaattcgcctgctctgccttccgttaacgccttcattttttcagcaaatgcatctgattgctgattaacatatacgcctggaacttgcttgtcaccgcggcaaaactgagataatttatctttcatttctttaagagaggtaccggtaatcgccgctctggcctccatcgcttctctgcccgattgtgtagtgtatgccagatcccgtaaaacgacgctttccgattggccgccttccatcacttcattcgggaacatgtctcttatcgctccggcatattccttcagtaagtattcagtaaccgcttgaatggaggggcaatccgttaattcatacatcgtgagttcaatatgaaacatttcgttaataaaatccgccatccggcttaattccaaaggccctacgccaaattcactcaggtgatcagaaatattaatttcttccggatggatatgaagcaattccgaaacaaacggtttgagtacttcattcaccttttctttcatatcagtctgtttatcctttacttcaggacttagtgaacgctgaataaaatctttcatgttttcggcatactcaagaagacgttcattgtctttggcagataacaggacaatatgcggttcgttctcaacatgttctgttgagacgtttgtttcttcatattcttctataatgatatgaacattcgttcctcccgctccgaatgagctgattcccgctcttctcggaacagttactgtttttccgttttcctgcagtttcggtttcttccagtcttgcaatgaccgctgtacataaaagggagatgctttaaaatcaatatttggattcaacgtctccgcatgtatggaaggaaacagttttttcagtttcatttgcaaaagaacctttgtcaaaccggcaattcccgctgcggcctcaagatgaccgatatttgatttgacagaaccgattgaacaatattgagtgtgctccgtaaattcccgaaacgcttttgttaatccggtgatctcaatcgggtctcccagagcagttcccgttccgtgagcttcaatataactaattgtacgagggtcaatacaagctttctgaagcgcgtcctgtatcagttcagactgaccatttggattaggaaccgtaaaaccgtttgttctccctccgtgattgaccgctgtcgctttaatcagcgcataaatatgatctccgtcccttaccgcttccgccgccggctttaaaagtacggagcccactccttctcccggtacataaccgtcaccgccctcgccgaatgtacggcatcggccatcacttgcaaagaagcggctttgatttaataatgtatatttattcggatgaagtgtaagattgactccgcccgcaacagcaagtgtgctttctcctcttcgtatactttcacaggctaagtgaatggcgttaagagaggatgaacacattgtatccaccgccatactcggccccttaaaattaaagaaatacgatattctgtttgctattgcagaaaatggagacccgacggccagttcatttcctttaagtgattcttcaacgccgaaaaattgatagcttccatatgtgacgcctgcaaatactccgacctttttgcgggtcagatctgaaggtttataacccgcatcctctatggtattgtacactgtctctaaaaagagacgttcctgaggatcaagaaaagcagcttctttcggtgatatccggaaaaataaaggatcaaaccggtctggatttttcagaaaacctccccacttatagcagcttccctcgagcatttccttccggtcatcaggaatttcgcttacgcaatcccgtccattcatcagcacattctggaactctctgatgttttccgcacccggatatctgccgctgacaccgataatggctatatcagcagaaaggggatcggccgcaatgtgctcttttgaaccttctccttcagagcgtgccggcgcttttgtttccactggttttcttttttgctttttttgatatgaaacaagttcagatttgccggccgggttcagcagtttcatcattcgttcgctgtgatgactcaggaaatattcggctaactgcgatatggaatgatattcaaaaaataatgttttcgacaatctgccgatactttgctccagctttttggtcaggcgcatgatcatcactgaatcaatgccgtatttctccaggtattgtttttcatctatgagtgagaccggtaatttcaattcctctgacattatattttttagataactgatgatattttgtcttaattcatcgctttgtaaatcggcatcttcctgccggtctgaatgtaagctgattgtgccggcacgcttcagcacatcctcaatcttttcttttcggcctttcagggcgatcagctgttcagatgattgacacaagctgttctccagagcctgtattccgtcaccgtcatctagcgggtcaaggccgagttcctgtttcatgtaggatattccttcatcgtcaatattcatcccgccggaagtccatagcggccaattgactgacaccaccctttcggcagactcttttgcggtcataactgctgcatactgatccaaaaaggcattggcgaaagcatagtcacattggccggctgatccgaagactgccgatgtggatgaaaacaagacaagtaattcaactttcatttttttgatttcttccgccagccagagcgcgccataaactttcgaacttgtgacttgatcgatttcttcttttgtctttcttaagataaaagagtcacggagtacgccggcactgtgaaatactccatgtaaggtgccgaactgctcttttgcaaaagcaaacatccgttcagcatcactttgttttgaaacatcagatcggatatattcaactgttgaacctgaacttcttaaatattcgatcttttttttctgctcttcagttaaatcagagcgccctgtcaatatgagattcgctttccatttttccgacagatgttttgccagtatataaccgagaccgcccaggcctcctgtaatcagataattttcatgatgtttcagcggctgggttaaatcgaataagccggctttattatagcttttcgtaaaacgtctgccgttttcatagcgcacttcaaaatggatatcccgtttttcgtcacactctctctgatatatatcagctattgctggaagagcggctcccgcaccctctgattgagtgatattgataatctgatagtgaaaattggggtgttcctggtgaacggttttcaccaatccgccgagagcatgatgcagcggcagttgttctttattctgagtttgaaaaatatgcgtcagttttattatctttttccattttaattcaatcagcgcctgtgtaatatacagaagagaaaacaatccgttttccaattgtttctgtatacctcccttactcatgtcagcctgagaatcagaccacaagtgaagaatcttttcgggcggctgataatgatcatgaatgtatcggaacagctttagataatcgtcttttttcacgtggttcatacaaatcgtatcatcatgtaaaacagcaaattcttctccgcggatgacaaacaagagagtgcagtccttaaacaaaccgctcaattcttgtatttgccgttcattttctgcaaaaatcaggagcaatcccgtcaagggtacgctcttcgtactcggaatgaacgattctgtccattccggcttgtaatataaaagaggatggttcgatgcccgtgatttttgattctgaatggatgttacacgggcatagccttcgtcagccgacatttgtcctgtttgaatcagatcaagaatatcgctgatttgttcacgttttccgttcatcattcttcccccattaattgtttcaatacagccttctgatcaatatcattggtttccaattgacgcaggagacgaatgagttcatcgtccgtctgaacagtgtctttttcatgaccatatctgaatctcacatctctgcactccgccagaatgcttccgtttccatctgtaaatgtcatatgacacgttacatcacggctgttctgccggttcactttttgagtataaacataaaaattttgagcgagaggctgatagacatccgccgctcccattccgatcaattccgggaaggtttctccgctgacaaaaaatgcactggcttgaatcgcggactcaagcgcttcaggagaaatcgtaaaattttctctttttgcataaagctcatccggcattgaatgaagcgacagcattccgtaactgtttttcgctgattcaatgacaaaaggcgcttcagccggatgttcagtcatttctgatttgacttcagcaatatcaagcgcttcaggaagcataccgctttcaggcttaaccatatgcgcatttccgctggcaagacgtactttattctcattttttgtgtttgcatatatgtcaaaccgcgcaaagtcacgctcaggcgtcagcgtaatcatcagttcccgtatatctgtcattccgttcatgctttcggtccacaataaatcggtcaatgtttgaactggttgtccaaatgccgccgctgcattgacgatagccatttcagccaaagatgcataagggaaaaaggacacgtttccttcagacagacttagtgcgaacggatgattacggctgatttttttcgtgaaactgaactgatgaaaatcggacgtgttactccccaagaaagggtggcccgtcttactcacatccgctgaaacaagtgcttcccctttttccgctatccaataccgctgtttgatcagcggttgtcccgggatagaaatcctgcgggcattccgattcacctcaaaagtctcccaatctatctttcttccatttacccatttggatgctgcttcggcgtaatctgaacaaacgtgaggcatttcattgtgaacttctgattcgaatgtattaccggtatggctcaggctgcttttttcacccctgatataagctgaaagctcttcagcaatgacctgcccggaatctgccactatcgccagccgttcttccatatgatcgcgtcccgtctgaagtgtataggcaatatcctgaagacgcagtttatgattgttatccttcgattcattttctgatagaaaatcagccataacctttgcatattttatcagccgttgtttgtcttgagccgataaaacaaagatcactcggccgctttgatgatcaaatgcttttggcggttcatacgcttccaatataagatgcgcgtttgttcctcctgccccaaaagcgcttaccccggctctcaaaggatgaacagcatggctgttttgcggaatattccattcagccgctttccgctgcacttgaaaaggaacctgatcaaaatctataaacggattaacaatatcggaatgcagagaaggaacaagctgcttattcttcatttggagaagcactttcgttaccgcagcgattcctgccgcagattctaaatgtccgatattggatttcaccgaaccgatggcgcaaggatggttcaattgataggaatctttcagtccttgaatttcaatcggatcgcctaatgatgtccctgttccatgcgcttcaatataattgacggtgttcggatcaatgtcagctttacgaagcgcttctgaaatgacctccgcctgcgcatccggattcggtatggaatacccgctcgtctttcctccatggttaacggcgcttcccttaatcacgccgtatatttgatcttgatcttctattgcttttttcaatggttttaacaatacggctccgactccctcaccgggaacgtaaccgcttccgtcttttccaaaactccggcatctgccgtcacttgatagaaactgtcccatgctgaggaacttatatttattcggatgtattgacaaattcactccgccggctaatgccatatcgctctctccgcaatgtatgctttggcatgcgtaatgaatagaggtcaatgatgaagagcacattgtatccagagccaaactcggaccttttaaatgaaaataataagacacccgattggcaattgaagaatagacggaagccggcgaaaaagccgctccattttcttctccttcaaatagttgatattggccccacattgcaccgacaaatacaccgactttcatcttttccagcatgtttctcgggtaccctgagtcttcaaaacaatttttggccgtttctaaaaagagtctttcctggggatccataagttctgcttcccttggggaaatatgaaagaaaagcggatcaaattgatcggctccgctgataaaacctccccacttgctgtaagacttccctttcatatctctgtcttcgctgaagaaatcatctatattccagcggtcaggcgggatttctgtaatacaatcttttccgctctttaaattctcccaaaattcaggtaagtcttcagccatcggatactttccgcttaaaccgataatggcaatgtcttgatgccttgtatcagctgtttcatttatttggatctcacggctttcatcctccttgaaggtatcttgaagtgcagattccaatttttctttgtcaccttcaaacacgatcagctgtgatgcgttcatagagagtgaatcttgaaaagctttgatcccattggttttactaaggggaaccataccgattttttgtttcatccatttttcagtttgtttatccactttcatgccgccgtcttcccataggggccagccgatggctactgagacgccggagcgttcttttttccgcctcattccttcacgccactcagcaaaaagatcgatgaaccggttagccaatgcataatccgtctgtccgatattcccgtacatcgagctgcttgatgaaaacatcacaaagaagtccaaaggttcggtttgcagcaagctgtccaataagaccgtcccatttattttcggagcgatcacttcctgaatttcatcttttgatttttgaatcaataaagcgtcgtgcgtcacaccggcactgtgtatcacaccgttgatttctccgaatttccttttaatagtttttatgattcgctctgcatcgcggctatctgaaaaatctcctcttatatattgaacggaagaaccgcctgctttcattcggctgattttgttctttttgtcttccgtcagttcagaacggcccgctaaaataatattggctttcgtttgcgctgcgatatgttctgcaaatataaggcctaagccgccggcccctcctgtaatcatgtatactccgttttctttaaaggagaaatctgagttttgagccggttctgcttcccgtaaggcacggacccagcgcacatttccttcataataaagatcggtttctcccggatgcgcttcagttgattcgcatctgatgatttcagctgtaagagccggcaacgatgtcttgtctgaaactgatatcccgattgtcttaagggccagtttcgggttctcaagcaaaatagactgccctgcgccatggactgaagcgtaaagcggctgatcatttttatggtccgccggataaaggaaaagcgatacaacctttttttccgccttgctgcgcatcaatgcccggctgaaaaagaatagcgggtaagcccctttagaaagctgttcacttattttttccgggccggcaaatgatccttccggccacccgtacaccacggtgtcgggcatttgccccctttttttcagatcagctgcaagcctgtcaaagtgggcttcctccctgtgatctatctcataaattccgtctccgtgataggagaaacgattccctgataaaacgagaatgatctgtgtattttcgaatccattttcagcattttcccgcataaaatgaaaaagctctctgtcatattgaaacagcagacatgttcttttctttttatttccgcaatgcgggtcccaagcggcagccttttgtctccaatacggcgttaaataggtcagagccgtatgattctctccatgatgtagagggaggtctttgtcaacggaagtcttttcgccgctctccgcaaaataatttgcaagtttttgaatcgtcggatactcaaacaataaagtagggtacagttccctgcctgttttctcctccaatgcctttacggcttgcataagtgtgacggaatccaggccttgttcataaaaaccttttaccacagagagtgtttcaggggcagtccctttgatgtctgcgatcagctgctgaatgtctccttctgttataagagcggaaagattttcgttcttactttctttcatgtcaggcttttcagccggttgattttgcgttaagaaataactggacattttttgattttctttaatatacgcggcgagttcccggatcgttttctgctcaaacaggagtgtaggatacagctgttcccctgttttgttttcaagttctttgacaatggcaagcaaagaagcggaatccaggccttgttcataaaaaccaatgtctgtccttatgtcacgcagatctatatttgaaaccccggatattaattctttaaggtgtgtctcaatgctttcgcttcgatctatgattgaatcttttctcatcaggccgtcttttggctgagaagccgcttcagtttctaaacgagtctgcttcagattttcaattaaatcttttgagcgaatatgtttcacagacagccgtgtaaaataagcgatcatctccccgtgtgcatcgtacaaaccgtaactgacttggatgacatcccctgaatcatgattttggtcttgcttctctatgtacacataacacctgtcttccaggcgcttcgtcatacggaaagattcaatatgaatgggaatatacgttttcatccggcttgccggagatccttgtgtaaaatattcgggacatgcctgataaaggatcgatatgatggtagacgcatcaagaaaagtgggatgcaattgaaaatagccggtatattgtttggcaatttggctgagcgacaactctgcaagtacagaatgatcagacgcataaaccttccccagactcttcataaattcaaaatgctctatatcaaccttttttaaatagtcatagcatatctccatatcggcttcacggacggaggcatgtttgatttcatcgatatgaattgaactcatgctttccgggaatttctgcatgagcctgcagttcatattctcatcccagctttcatccagaatccggtcatcttttacctttctgctcttcgcctggatttcccatccctgttccaatccctgaaaacggatgcggatttctctgtcaaaggtgtccgatgttgctacaggttccaaatacaaaatattctgacactcgagttcttcaataggcaaacctttactcagcgccatacggtatatcatatctaaaaatgtgacaccgggtataatccgggtgccatgcacccggtgatccctgacaatatagtccgtatgtttaattgttaatgtgaactgatagttttgattactggccacctgtctcattccttttcttttctttataattctttgaaatcaagtaaaggaatcagcaattctgactcttccttttctggagcttctccattgtcgatccagcattgttccttattgaatataaccggagaaagcgggtgtctttttgtctctccatatcctaacgtgagatggctgtcgctcaatatcatatgtgcgttcgtgcccccgaatccaaaagaactgattccggctctcaaaatcccttttctgggacgccattcttttaaagacgtgttcggaaagaaaggcgactgatcaaatttaaaacgcggatttggcgttttacaatgtagtgtcggcgggagcatctgattttttatggataaggcaacctttataatactcgctatccccgctgcgctcattaaatgtccgaaattcgtttttacgctgcctactccgcaaaattgcgtttcttccgtaacctcccggaacacttcagtcagcgcttttaattcaatcggatctcctatcatcgtaccggtgccatgcgtttcgacataactgagagtatctgcatctattccgccttttttcagggctttttttatcactgcgctttgcgctttcggattaggtgttgtcatccccattgtctgtccgtcattattaaccgcggaggagtcaattaccgcgtaaattctgtcaccttcggcaagggcgtcatcaagtcttttcaaaaggactgcgccgcatccttctcccggtacaaatccatctgccttctcatcaaatgtatgacattttccttcaggtgaaagcgcccgagcctcactcagcatgacgtaaggcttttgatccagcaaaatgtcaaccccgcccgcaattgccatatctgactcttttgacatcaggctttgacaagcgagatggacgctgaccaatgaagaagaacaagccgtgtctacaaccagattcggtcctttcagattaaaaaagtgtgagatatgcgcgcctatgaaattttgtcctatacccacgatcgtattttttgaaggggaacctattttggacataaacgtcccggtgcgcgaaccgatgaaaacgccgacttctttgtttgatacttcttcctttgtatagccgccgtctctcaatgtctggacgctgacctcaaggcattttttgattaacggatcaagctctgatgcctcacttttgttcatattaaaaaacgcgggatcgaaagactcaatatcttgaagaaatccgccccacttactgatactttttcctttttcataggtgtcagagtagtatgaagaaatatcccatcgcgacgccgggacttcacggacactatgttgtcctttcttcaaatttctccagaatgtttctgtgtccggagcatccggaaactcacagcccattccgataatagcgatttgattcagactggttggttgcatttgagatccgctgtcccgtacttcggaagcattttgatttatatgttgctctttattccgaacctcaatattttctgaatcaatttgaggactgatcccctcacttgcaaataactcgttcaaatagacgcccagttgtgaaaaactcggatactccagaaaagccgaaggttcaatttttatttgaaatgcatcttccgcttttttgacaagctgaaccagtaagattgaatcaactccgtaatccgcaaaagacgtatcctgatctaaattcccgtaaggtattttcagctccgcggaaaaaatctccattaacttcctgatcatagcttcattgtcaccatgaccagagatcactttttcctcagcatccgggttatttttagccgcttgaattcttgtctgaagcagctgcttcagcttgaatttctccggatgtgtctttgccggtataaggcatggatatccgtttatcgtcatgatttcatccagcatggaaatacctgtttctgttgagtgtgaaagtaaaccgagtgcctgatatgatggacttgtcacctcgcccatcccaatgtccttccagctcggccagttaattgattgataatatgttttgccggctgcatgctgatacgccgcaaagtaatccataaaagcgttagccgcggcatagtcacttgttccggcgcctaataaaggaaaagcgctcgcaacagatgaaaacaaaatgaagaaatcaagttcgtcatcaataaaaacgtcatgaagtacttgcatcccctgcacctttggctcaaatacttctcttatttcttgatcagatttatgaataaaagccggattcgaatgattggctgcaccagcgcaatgaatcaccccgccgattttgccgaacttcattcgcacctctgaaaagaagcgatgtaatttttctttttccgtgagcggcccggaatacacttccacctgaactcccttttgatccaactcatgcagcagttgtaatttcgaataaagaggtgacttttcatcggtgtcttctaacatgccggctattttatcagattccggaaggtcggttactcccatcagcacaagttttttgactcccttgccggcataatgtctggcaagttctgctccgatccctcttgttccccctgtaataaccaaggtttgatccgtacggcataccggcagaccggataggttccggtttatttccgccgcatttaatttctcgacgtatggaatataacgatcaccgttccggtagcagatttcactatacagcccgtcagcgcaagcttcatctgtgattacctgtctcagttccgccgcagtcccgacatgcccgtctacatctattgtttttgattttatcttttgatactccgcgctcagcattttatatagtccggctgtttcggctccggctaacgacggcttgtcattcagaagtgtctgcagccctcttgtcacatgtaaaacgaaaagctttttacgtgtctttatgatttcctgcagcagtgtcagcttcccgattgtgccggtgcgtgccccgttttgattactccgcaaatctgacaggtcaatcatgccgatgatttccggattttcttctatgactgctagagccgtttttttggcttccccatccgaatgatcccagttatctgcgcaaatgacagcgggttcaatcagaggatctgaatcaaacaattcgaatgcaagccgctcactttcactattagccaggatcatcacctgtcctttcgtaaaagcggaaggcgcagccttttgttttttccacgatttttttaatacatcaaatgataagtcagtcggtgcatggggcagactctgcggtacacctgttttctgtttctgtgctgcttttgcggcaggcacccaatatctgttccgttcaaaagggtatgcaggaagagaaataagcttcggtaattccgcagtgtacatctcttcccattcaacgtctcctccgttcacccagtgaatggccatatctcttgcattttcaaagtgagcggctgacagggcattcttttgaccggcgcctcggcgggcgtttcccctatataaaccgtttaacttatgatctgaccgcaaatacatcgtcagcttatcgcgaagatcgtcaaggctgctaacctcaacagcgagccgctcttccatagcgtttctcccggtctgcgaagtgtacgcggcatcagctagtgacgtttttggctccagttcttttatatatgcatcaatcaagagtctgagccgttcttcatttttggcagaaagcagaataatttgcgtcttgttgctctgtaccgtttccatcttttcttcattcttgtactcttcgatgataatgtgggcattagatcctccagcgccgaaagaactgatacccgaccttctggcttgattttgcggcgtctcccaatcggtcaattcagactgcacgtaaaacggtgtttcctcaaaatcaatattaggatttaagttatcggaatgaagggaaggagcaagctgtttatacttcatttgcatcagcacttttgtgatagaagcaattcccgccgcggcctctaggtgtccgatatttgacttaaccgaaccaattgcacaacgataatcgcttttcgagctgtgcaaagctttggttaaacctgaaatttcaatcgggtctcccaaagatgtccctgtgccatgcgcttcaatataacttatgctgtctgcatcaatccccgccttatcaagagtttcactgatgacgtttgcctgctcgcccggatttggcacagtgtatccatttgtttttccgccgtgatttacagatgttcccttaatcacaccgtaaatcctgtccccgtcagcctttgcggcagaaagcgatttcaaaagaacggccccgactccttctcccggcacatatccgtctcctcccgctccaaagcttctgcagcgcccatcgcttgaaacaaaatgattttgtgaaagtaaagtatatttatccgggtgtaaggataaattcactcctccggctatggcgagggtggattctcccctttttaaactttcacatgcaaaatgaacagcagaaagtgaagaagaacacattgtatcaattgcaaggctgggtccgtgcaggtcaaagaaatatgacacccggtttgcgatagacgaataagaagacaagagcgcctgacgtccctcatcatctgaagcaccggctgcaaataactgatagtggctgtaggtgacgccgacaaatacccctgtcttatgccgtttcaactttttctttgtgtaacccgcatcttcaaacgtgtgccatgctgtctctaaaaataaccgttcctgaggatcaattaactcggcatcacgaggcgaaattgagaagaacagcggatcgaatttatcagcgtcttttataaaacctccccatttgctatcatgacgggcattgtcacctgtgtgataatatttccgaaaatcccagcgctctttcggtatttccgttatacaatcttttccggaagaaatattttcccaaaactgttccacatccttcgccatcgggtagcggccggctataccgataattgcaatatcttcctcggaaggtgcggatggtatgcgggaaacggaaagcttctcccgtttcgccggcgccgaatgatcaattcgctgttcggctgccggtaaaaacgccttcttcaactcatgttgatagtgttcaagaaaatactctgacagctcttcaacactgctgtattcaaagaaaagagtcttagacactcttccaaaatacttttcgagacgggagttaagacctaaaattgttagagaatcaattccgtaacggtcaaatgtatcctcgggtaaaatgctgtccgccggtcttcccgtttccgcaccgacgatctctgtcaatagacggatcgtttgctttttcagatctttttcatttaattgcggcagactgttgttttcaggcacagtctctatctttttatggtcagttgagagtaattcacttattctatctttgtctccgctgataacagccagctgagaagcagaacggctcatactgtcctgaaaagcggcaagccctgcttgggcagataaaagttccagccccgtgtgtcttaaagcctgcagctctgccggaccaactgtcatattccccgcatcccataaaggccaattaatagaaagtgttttcccgggacgtcccttaatgcttcgatactgggtgaatccgtccatacatccgttagcgaaggcgtagtcgctctgacccgcattaggcagaacggccgaaagggatgaaaacataacgaagaaatcaagaggctcttcttcagctgctttatccagccaaacggttccgaatactttaggcgctataacttcttctatgctttctttcgctttttttatgataaatgcatccttaacaagtccggcactgtgcaaaattccgtttaattctccgaatgtctgcttaatgtgcttaattaacgcgtccgcctctttttcctttgaaatatctgccgggacatataaggcttcagcaccgagattttcaagcgcgctcaatttttgcgccgtttcacgggatgccggagaacgcccggttaataccagcttgacttccgcctgtttcgccagatattccgcaaacagatacccgaggcctccggctcctcccgtaattaaatacacaccgttcttttttacactgaaactatgtttctccccatcttctttttttactcttttaagctgccttttataataatgcctcggctcataacaggtaaagtggtccgtcttgcattgattgttccattcaaaagagatgacatctgcaatatgctgctttgtaaacggctcgtcaaacattgatttcagctctgcagccttacatgtgaaattcggattttcggcctgtacggtcttaagaaaactttcaaccgcgttataaatgggctgaacctcgccctcggcattttcatacagaaacaaaacttctgctttcggacaaagtttgttcgccatgaaggcctgaaacatttgaaacaaggaaaacagacttttattgagctgctttcttattgcatcttctgtatttttgaagagcccggcagctaaaaaatgaataatatggcggggtcttatattttgagaacgcagaaccccgcatagcgcatcataatcctcatcatttgcaaagttcattttaaaacgaccgttccggcaatcttcgaaacgctcgccggaagtcacgtaaatgaaaggcgcctcatagccttcaagctgtctcttcattacggtatacatgctgtcgtctttgcaaaaaaataaaattggctctttcgtattcgggaatttttcactgcctttaaattcatgtctatcccataccatttcatatagatgggttttccccaaactcttaattaattccagcccttcttcacgcgtcaggctgccttctttcacctttttcacgatttgctcaatttgcatcgttttttcattcatggaaaagcaactcctctatcagctctgacgtctctttcgtattcatctcacctgtttgtgctttttcaagaagcgacatgatttctccatctgctgtatctttatttgaattgtgaagctcagtgttcgagaaagcctcaatcttctgcgcttcatctttatttaaatgaatccaatgtctgttcttactgaaaggataaagaggaagaggccgtttaaccggtttgagttcctcctcatacaagtcttcccagctgatttcacaaccgatcgtccacaactgagccagtttggccggcttgttttgctgaatcagtgattgaacatatgcatgaccttcggggccgccgaataaaggagcgtacagactatcaaaatccgttacatttccttcataaacaccttgcagtctgctcccctgaatgtaaccgtttaatttttcaagaagatctccggtattcgagcaagtgatcgcaaggcggcattcaaatggttcccttccggtttgcagcgtatatgctatttcttcaagaccgattccggacttttctctaaaattgccgttatacggtttatcagctgatcgattccagacgctgctgatatagcggcacagctcactcagggtcattaattcctgaaatatatctagtgatatttctgtgccgtacatttggtttatataagagattaattcggaataagccaacggatcaaatccgaattccgaaagaggtgtctttgcatctatatttgcggtatctaaacgcaggatacccgctgccgcttcccgaaccgcctcttgcacatcacgttcctgcacctcttgctgactgaattgaactgatagttcttcatgtaaaaacgctgttaactctttggctttaaccatcagcctttcctttgttttggccgatagaacaatgatttgatcccgctcggcagttactgctttatcttgtccgtattcaaattcttccacgatgacatgagcatttgccccgccgaatccaaaggaactgactccggcgcggcgcggaatttcatttccttttcgatcttttaatctggcccacttcatagttttattgacaatatgaaacggtgttccgcttaattgaatgtaagggttcagctccttaacatgaagtgtggcaggcaatgttttatacttcatggatagtaatactttaatcagccccggcattccagaggcgggctctaaatgaccgatattcgtttttactgaaccgatgccgcaatattggtcatgattctttcctggatgcggctcaaaagatccaaacgcttttttcaagccttcaatctcaatcggatctcccagttctgttccggttccgtgtgcttcaatataagatatcgtatcaacaggaatatcggcatttttgtaaacagacgttattagttctgcctgagcttccgggttcggagcggtcaatgaagcagatcttcctccgtgattttctccggttcctctcaggactccgtaaatattgtctctgtcattcattgccgcttgcaatggtttcaataacagaacagctgcaccttcaccgcggacataaccgtcggcaagtttatcaaacgtcttacaccggccgtccctagacaaaataccgagtttatcggtatacatatgcgtgactggatctaagagcagcgaaaccccgcctgctaccgccagctcactttcgccattttgaatcgagcgcacagctctgtggattgctacaagactgcttgagcaggctgtatcaatggactcactcggacctctgaaattaaaatagtgggatacacgattgctgatgagcgcctggctgtttccggttcccgcaaacgcatgcgccccgtccgaatgcctcatcagcagctggcggtaatcattaaattgaatgcccgtaaacaccccgatatgtttgccggacagctttgaagctttgtaacccgcatcttctatcgctttccaggtttcctgcaaataaattctgtgctgaggatccatgagttctgcttcccgcggattaatattgaaaaacgcctcatcaaatttatcggcatctgtgataaatccgccccatttcgaatgtacttcgctgcttcctttgccttcggcgtattttttccaatcccatcgatccgggggaatttcctgaatcgaatctttttcattgattaaattgatccaaaactcatctgcattttttgctcccggaaaaacacaactcatcccgataatggcaaccggctgcttctccggatgatggtcagcctgtcttgctgtctttttttcaaacggaaaacttcgcggcggcttcacggttttccctgcggttttcccggcgtgcactttccttttttcagaaatatttttttctgcacctgtattcccttttgcaacagtacgcagttcactgtttaggaattctgaaagagactttatatggctgtaagtaaagaaaacggcaggtgtcagcttaagcttgtattttttattcagtctgacagctaatgttttcaaactgatagaatcaaagccgagattgccgaaattctctgccgtatccagctgttcaatgttaattttcaataattccgacaccatttgtttcagttcttcaaggacattgtctgcagaacccggtcctctataagaactttcctcttgacgaaccggaagcgtatttactttttgatgcggcagatctttttttgctggtgttgttccggcatccccggtaacaaccgaaatttgcggacagtcacttgccaaaattgtctcaaaagccgctatcccttcttccgtttccaaataatcaaacccggatgcggaaagatatgcgtcttcagcttctttgtttaaatgcattccgcctttacgccacaacggccagttaatcgaaatgctcttgccttgtctctcttgcctgcggctctgttcggatctccaatttatatattgatcttgaaaataattgcccaacgcatagttaacctgtccaaaatctccgaagaccgaagaaatagaagaaaatacgataaagaaatcaagcggctcatctttcgttaattcatctaagcataccgttccttcaattttagcagtcatgccttccgtaaaatcagtcagattcatctctgtaaataaccgatcatcggcatgaccagctgaatgaataacgccttgaatggatccccaagtccgtttcgtttcttctatgacccatcccatcgtcttttgatctgcggcatcagcttgataatataccgcgtctcctccaagcgcctgcagccggtcaatgttatgtcgtttatcagctgttaacggtgatcttcccgtcaatactaattttgcttgatactgagaggctaaatattttgcaaaaatcaggcccagaccgcccaaaccgcccgttatgaggtaaatccctttctgtttcagctgatgagagtgctctgtatgattgaatacatactcctttaatgtcttaacatacctcttgtcatttatatatttaacttcttccgcctgccgttccacgcctgaaaccatttcgttaagacaaaattcagccattttttcaattgatatacgttctgaaaaaccgattgacttcacattctctgcggatggcaccaacatatttgccgtttttaaacagcctgcaagagcgcccgtatacggatcattcatgccttttttaaaagagtgaacaagaagcagagaatgaagataaagagaggcgtcactgcgggcgctcagggcttttaataaataaaaaattgattccaggccgctgagaaggcggtcacccgcgtaaaatgtttctcccgtgtgcaagatgacatcaggagaaaacccttttttctccaattcttcgaataaacgaatataatctgacgtcacttccgggtttatacagaatgtcagcagattttgatcggtctgccgctgatccggcgtgacgagaatgacacggctgtctgattgatttttcagagcttcagccaacgcttcatcttttgcaaagaccagaattgtttttggctccctatctttcatttcaatcagagggtttttttgatcccactcatgctcataaaaacgtacatttttattaggcttttcgccaaaaaccagcccgctcagttccatcaaaatcccgccggcattgtctaatacatacacatcataagccgaatcgctttcttcagtttgttctgcatatacataaacgggttcagtctcatgatcaaaaatcgtacattctttaatattttccggggtctctccggcattttcccccgcaaggtatacgacggcttgatatgcgctctcaatcacttccggtttgattatgcaccctttcggcccggcctttgcttttatctttaaaagcacctgtccgttcctgctgacgcagtgctctgcggctttcagactgtcactgcagctgtatccgaattcggcaagccgctgataaaacgcttcgtacggtatacggtctgcgccctgagacaggaacggctcaagatgaatatttccgttctcgtacgccccgccttctaattcgagccgccctgaggaataaatggataagtcgctctgtttttctatagaatacgatgcaccctgattatccggggttaatacaatccggatctgctcattgcttccgctttgtaacatcggttctctaaaggagagctcagttaatttaataatcggattccctgaagccatcgctccggcagctctcgccatttcaatctggctgagaaacggaaacatttccttgtcttgatactttgtttttatatacaaaccggtatcgcttacattgataagaaacttctgggctttaaaatcagatatattgcatgaaatgtaaggatgcagatcgttatttacgttcatccggcggcttcccgtattttgcgcatctattctgcatagctctttggcaaatggatatcccggtgctgatacccgtctcaaagtgacatctttataaagtgacagccaatctactccattaccgccaacccagtattcagcaatcttcacaagatccctgtttgcggctgattcttcaatttcagctttgttcgtcctttgagcttctgttgtgtctttgccgcttgtaaaaatatgatccctcgcatttccgagagtatagtctgtcagccctttaagcaattcatctcttgtggaggcgataacagccaatctgtgcggcatttcttctctcccggtttgtaaagtaaatgctgtatttctaagtgtttctaatgaataatctctggctgctatttgttcttttgcgcgttttgcatattctgccagcctgtcggcattttttgcagaaaaaacaaataaaagctgttcaggttcttcagccgcgagaggagagatagcttcatccgcaaattcttctaaaataacatgggcattagctcctcctgccccgaaagaactgattccggcacgcctgggaacggatgactcccatttttcggctctgtccggtacataaaaaggtgttttttgaaacggtatattctcattcaattcagcagaatgagtcagtgacggaacaatcgttttatgtttcatttgaagaataactttcgtaatgcccgctatgcctgcagcagcctcaagatgtccgatatttgatttaaccgacccgatcgcgcatgtcttcttatcgcgttcggcacctgaaaatgctttggtcaggccggtgatttcaatcggatctcctaacgcggtgcctgttccgtgagcttctatatagctgatgcttttgggatcaatacatcctttttttaaggctctcgtaatgacctcactttgagcttttggattcggcacggtatatccattcgtcttagcaccgtggttgatcgctgttgccttaataactgaataaatctgatcaccgtcggcaatagccttttttacgggtttcagcagcacggcacctgtcccttctcccggcacatagccgtctcctcctgaaccgaagcttctgcaccggccatcactggataaaaatcctccttgagtcaggagttcatatttatgaggatgaatggataaattgacgcctcctgcaattgcaatttcacattcattcctgattaaactttcacaggcaaaatgaacagccgttaatgatgaggaacacatcgtgtccaaagcaatacttggcccgctgaaattaaagaagtaggatacccggtttgcgattgatgcaaatgaggaagaaacggccgcttcgtgaccaacgctgtacagctgatattggccgtacataacccctgcaaaaacaccgacgttttttctttcaagcgttttctttgcgtacccggcatcttctatggtgtgccaaaccgtctctaaaaacagtctctcctgcggatcaattaattcagcttcggcaggagaaatattaaagaacaacggatcaaaatgatacacatcgtcaataaatcccccccatttgctttggttttttacttcgtcgcccgccgcaggctgatagtgcagcctcgaatcccaccgatcctcaggtatctcagttatacagtctttaccgttcaataagttttcccacagagtatcaagatcatttgccatcgggtaacgtccgctgataccgataatagcgatatcattgtcatgatacttctcctgctgcacctgatttttcatctggattttctgtttcccgttaacatcggctgtctgtttattatcttttttcttctgagatggagtgccgctcccgttttctcctaaccggagtttatgaagaagagtatccctgtgctcctcaacgaaatactgtgacaattctgccgcagtctgatattcgaataacagcgtttttgagagcgcgccgaaatgtttttcaagctcattcgtcatattgataatcataacggaatcaagtccgtatttttccaatgcctcttctgcatctattttgtccgcaggcatcctgaattctgcagcaattatttttatgataaaatcagatgtttcagctgtcagtttctctgaatcaaatgattcgatatttctccctgttccttcatctgcctgaatattgtcttttcgttcatataattgatgaacatgattgtcaatttgctcatctccgtaaaatacagtgaattgcgaaaaaccggaggacaatgcgacggcaaacgcttttttaccttcttctttttctaaaggataaaaacccgcctttttcattgtctctaccgttcgctcatccacttgcatgccgacttctttccacagcggccagttcagagagagagaaatcgtatcagaatgctgggcagaacgcatattcataaaatgatccatataactgtttccgaacgcgtaatcagattgcccgacatttcccaacactgcggaagtagaggagaagcaaatgaaaaagtcaggattttctttctcaacagcatcattcagccacatcgtacccaatactttcggtctgattacctgatcgaattcctctcgtgacttgttaagaaggaaagaatcccggatgattcccgcgccctgaatgaccccgtttacttttccataagaagttttggcttttttgactacatattcggcttcttccttattggtaatatcagcctgaacataaacagctgaagaaccggcatcctccaatcgcctcagctgttttcttatatgatctgaaagcggagatctacctgttaaaacaaggcagcattttgtttgaaaagccaaatattctgcaaaggtaaatcctaatccgcccgcgccgcccgcgataatatatactccattttctctcagcggcacagctccgcttccggaatttttttcgggttcatacgttttgagctgtttgacataacgctgcatgtctttataacggatctctacatctgaaggctggaaatcactcagctcattgcgtatgatatcagctgcgtgaacggctgctattgactgctccatttcaatgctttttgctgagattaacggattttccagctgtaatgtccgcaaaaatccgcttgccgccgcgtaaagaggctgttctccggaaagatgcgaaaaatatccatataacagcttgatcggtttgcggcagttatttttgaagagcgcctgttgtaataaaaacaaagaatagactccgctgtcgcattgttcacgaattgctctctctgttttttcaaacggcatgtctgaccataaatgcaccgcttcccgtatatctgacttctcttcttctataagccatcctaacaggtttatgtaatctttttcagagcgggggtcgatttcaaatacaccgtccccggtttttcgaaactctttccccggcttaaccaaaataacccttgtatcatgcaatgcagcaagttctttactcacatcttcatttttatcaaataataaaaggctgccctcacgccggccgccttttacatgtatgctgagatctgtccgctgccagaccgtctgataatatatcgcctgtccgttaccccctgcggaatgagaaccaagctgctgtatccgctttactccttcttccaaagaaatgatgccgctttctatgtcagaaagtactttttttctaatatgacgggcttctttcataaaaatcttcatcccctttacaaatggcactgccgcaaaatgataaactaatcctgcatatgctccagcgcataatctgcttcttcggcagtcagttcgcccgcttttaattgtctgagaagctcttttactctctcgttctttccattggaatccgctgttgcacgagtctgtgcctccgcggaaaacgtttcttttttacgaatggttacatccttcaaacctgcaagtctttctccttgttcattaagcagctgaatatcgtaaataagctcggattgacctttttggcctgttttacgcgcatatgcccagcattctgctgaaacttttttccgaatcgtaatctctcctattgaaaaaggaacataaacagatgcctcttctcttccgtccgtaatcccgaacaaagattgcagagccccatcaattaaagacggatgcaatgtataattttcaagagcatatgcggcttcttttggcagcaataagtgtgcaaccgcttctgtttttccgccccataaacgttgaatcggctgaaaagcgcgcccatacaggaacccgttttcccgaaaatacttgtaacattcatcttgttcacggacaaaagcacttctgtttatcatctcttgtctgtcgatattctctatatcatcatcaccgtaatgatgatcataatctaattcccccgtcacaaatccagtccttacagcagcatcctcgtcagatgacatattaaataatattttgccgtcttttacggaaatgtgagtgtaaatggtcagactctcttgcaaaagcatggccggtcttgcaaagatcacgttttttaaacgagtgacctctttctttcgatatgaccgcgttcccgctgcgcatgccatttcaagaaaagcagctgccgggagaatgctcttgttttttacgatgtggtcttttaaccaaatctctttttctcttaatgtcgttttaaaaaactgctgttccagagtagattcattcgaatccagaagcgggtgcagtgaagactgctgcggcaatatttccggaaatattgcgctttgatttcgaggcacccagtaagactcctcagcaaatggatataaaggaagcttgaccttttgcggggtatactcttcatataactctctccattgaatatcagccccgaaagaccataattttgctagaagattcaagtcctttgtctccatcatcacttcgaggaatttatctttcatcttttgatcatgaaagataaagactttatcaaaatcttttgtaacattgcctttgtatacgccctctccaattgttccttcagtacagaaagttctcagcttctccttaagttccggcaaatcggaagctacaacagcaagtctgtcttccataggctccctgcatgtctgcaatgtaaaagcgatatcagctgccgaggctgttgtctcccgctctgtgaattgcagaaggcgccgggcgtattctttcagtctgtcttcatttttggcagaaagaactgcggcaaacggaccgcttattgtttgtgtgtccgcatggttttgatattcctccacaatgacatgggcatttgctcctcccgctccgaacgaactgattgctgctctcctgttagaggcgcctgattctttccgccactcttcttctttctgctgaacgtaaaaaggcgtcttttcaaatcggatattttggttcagctgttccgagtgaatggatggcgccaacttctgatgcttaaattgtaaaagaacttttgtaagggctgctatacctgcggcagactccaaatgtccgatattagacttcactgaacctatggcacaaaattgtttatcatccgtaaatttctcaaaagcttttgtcaatcctgcgatctcaatcggatctccgagcgaggtacccgttccgtgtgcttccaagtagctgacggatcgcggactgatgcccgatttcttgaaattttcagcaatcagctcagcttgtgcattcggattcggaaccgtaaatccattggtttttccgccatgatttacagatgttcctttaatcactccgtatatatgatcctgatcagcaattgctttttccagaggtttcaacagaacggctcccgaaccttctcccgggacatagccgtctccgccctctccgaaacttctgcacaatccttcggtggaaacaaaattaccttgactcagccaaaggtatttgctggggtgtatggatacattaacgccgcctgcaagcgcaatttcactttcccctcttttaatgctctcacatgccaagtgaatggccgtcagcgatgatgaacacatcgtatccagtgcaatgctcgggccggagagattaaaaaagtacgaaaccctgttggcaatagatgaaaagaaggaactgagcgcaatcggattgccccgcgcagtttcttctgcgccgaataattgatattgtccgtacatggctccgacaaatacaccggctttcataccgttaagcttctcttttgtatatcctgaatcttcaaacgtatgccaggaggtttcgagaaaaattcgctcctgagggtccatcagctcagcttctttatgagaaatgtggaaaaacagcggatcgaattgatcaacaccgctgataaaaccgccccacttactgttgattttccccttctccattctgtcgggactgtaattcgatctgaaatcccaacgttcctcggggatttcaataatacagtttttccctccggcaatgttttcccagaactcctcaagagtatcggaattcggatatcttccgctcacaccgataatggcaatatcctcccccggctgatccatgctcggtgcaggtgtatccttctgctgccggtgctgttttttactcggattttctcttttcttctgtactcttgttaccggagctgcccctgcggccttaagcactttttctttaaaagatgttaggaagaagtttgaaagctcttcaatgttctgatattcaaaaaagattgttttcggaagatccccgaaagtatcttcaagctttgcaataagtgacatgatcataagtgagttgattccgaacttctcaaaagagtctttcgcatttattttatgagcttggattttcaagacaccgctgatgatcttgattaaatagtcattgactttttctttcgcagcatattccgcttcttcatcgtgttccgccgtgagtgtatcttgatctgctgcagctgtatttctttgaatcgaaagcgcctttatcattttatcccgctcaccttctgcaggcattaagctggtaaatgaagaccgcagcattttcagaaacgcttccagaacagaggaagttcgcatcggagtcattccgtatttttcttttatttgaacgattccactgctgtcgagactcattccgccatctttcaataacggccaattgattgatagtgtttttccgtttcgagagagctgggatcgaagcattgcaaaactgtccataaaatgatttgcgtacgcatagtcactttggccggcatttccgtaagcggaaaaagaagaaaagagaacaaaaaaatcaagatcttcgtcttttgtcagctcatccagccagattgtcccgtaaactttcggtttcagtacgtccgtaaaatcaccgggacttttatttacaagaaatgaatcacgaaggatgccggcagcatggatgatcccgtttatgctgccgtaccgctgtttaatgccgaaaatgaatcgctctgcctctgttcgatctgttatgtccgtccgctgatattcaacaatagagccgctctcattaagcatactgatccgttctttttgatcagctgttaaaaaagaacggcctgtaagtataatcacggcttgattttcattagcgatgtgttccgcaaacagcagcccgagttttccggctcctccggtaatgatatatatgccgcctttttgatacgttacagatccgttatcgtgttccggaatatcaataggctgcagccctttcacataacgggtatatgagtctattaaaatctcacattcatccgtttgaatgcgctgcatttcactgattgcagcatcccacatctcggaaaccggaggatttatgtcagaatcctcgtggcgtatctgtatggttttcgctttaagcttggagctttccatgtttaccgttttcacgaaccctccgacagcttcatgaaacggctgattcagaccgcttgtccaataaatatgcaataacgtaacaggttcgtttcttcgcattaaagcttttgataataaaaagagcgagtttatccctctgcgaagagattcattaacagattcttcagtgaattctctgatttctctattccataaataaagcacgacatcaggtgtaaatccgttttcagccaaatcagacagcagcatttcgacatgatgttcatcagaaggattgattgtgcatctattccgttcaattctgtaatcagaatcgggcgttacaagaatgacacggttatgttctccattcatcatctcggcatgctgaaaaagacggttatcctgatcaaaaatcagcatattccccggtgcctgctgattcggcatatcaatgtgatttgtcctgacccaatcggtcttaaaaaaaatggttggggacggagcttgtgattccggctccgcctttttttccatttgttgttttctgtaagtacgaattagctccagtcctgcatcaggagacatttgctgttcttcaattaaggaaagtatttgtttgatctgcactattttccctccagcagctgataaacttggtcagcagaaagttcaccgtttttcaattgttccaataagaagagaatttcctgatcttcatttttatgacctgcggttaattctcccccggtcacttttctgacagagaagtctttcatgctcacggctacttcgccgctctcgttaataaaatcaatgttatacgtataaaaaccggtttctctcaccgaaacatggcatcgggcagtaagcgccctcttaatgtgaagctctctaagtgaataaggaacaaataagccgtctttctcattttctcttaacaaaaatgcagccgcttgaaaaccgccgtcaattaatgaaggatggagtgtaaaatgtgaaaacccgttcgctaaatgatccggaagctccaattctgccattaactccacatcaccgcgatatacggctttcaacgtttgaaaaccgctctgatatgtcaggcccatacgactgaagcggtgataacactctttccggcttatgaccgttttactgctgcgtatgaactgatcaatatcgacatactcaggattgctgtttatgtctccgaatactgtttcacattgtgtgcagatttgctgcacgccatccgggccctctttacatatcgttgcgttcaacttatcttgtttcatttccaagccggtataaatgtgcagcgtttttcctttatataatataggtctgttccacatcacgtcttttattttatatactttactttctccgcttatttccgcacaaactagagccatttcaagcgaagcggctcccggcaacacacagtctcctgaaacaaggtgatcagtgacgaaaaattcagttccggaaataacagttttaaatgcttgtttctttaatgttgagacattctcgctgattaatgggtgaagacttttgctattaacctcgcctttgttctttttcggagtaaaccaataactctcttttgcaaacggataagacggcagcggcactctattcaatttctcattgccgatggtcttccattcaaactcggctccattggcccaccattgtgcgagcagctcctcctttccgctttgaagagcctcctgaatcatatattcagaaacagctgcacgctcttcagtgttttcgcttataaatacgccattttgcaccttgcttttatcaagaaagctgacgtatttatctctcagctcagtcagactcactgcacatacggcaattctctcgttcattgcttcccggccgttttgcaatgtaaattccatgtcactggcattaacggtcatgtcaccggcaatcacgcgatccaagtactgaaccataagccggatatactcaagtaattgatctttggttttcgcagataaaacaaaaatgtgtgttttaccgttgttttccggtacttctttttgaggttccctatattcctctaaaacaatatgtgcgttcacaccgccgaatccgaatgagctgacacctgctctcctcggcagatcgttgttctcttcatcttttatcggattccacttttgagcggtttctgtgatataaaatggcgtattttccattttgatgtatggattgagttctgaaaaatgggcgagtcccggaagtttgcgatatttaaaagccagtaacactttcagcactccggctattccggcagcggtttcgagatggccgatgtttgttttcacagacccgattccgcagcttttctgtttctcaaaaggaatgtcccattcttgatataacgttttaaatgcctttatgatgctgtttacttcaatcggatcgccaagacttgtccctgtgccatgcgcttctatatatcccgcagtggcgggactgacccccgccttccgccaagcttcggttaataagtccgcctgtgcgttcggattcggagctgtcaaagaattggcgcggccgccgtgatttacagctgaccctttaatcaaaccataaatatgatcaccgtctgcctgtgctttgctgagcggcttaagcagtactgcagccgccccttcactccttacatagccgtcagcgcttttatcaaacgttttgcactttccgtctttggaaagcatacctgctttatcaaaagctataaacagagtagggcttgtcataatatgcactccgcctgcaatcgccatttcaaaatcgcctctttgaatcccctcagccgcacgatggagtgcaactaatgaacttgaacaggcagtgtcaatcggttcgctcggacccgtcaggttcagctggtaagaaatacgattagccaatatacaatgatttaaaccggttgcggtctgcgcctgaacagagacgccattttcattgagacgttccgcatagtccgttgtggcgacccctgcaaacaccgcggttttcgtccctgccagatctgacggcttatagcccgcatcttctattgttttccatacagtctccataaaaattctttgctggggatccattaattctgcttcggcgggagaaatcccgaaaaacaacggatcaaaactgtccgcgcctttgataaatccgcctttttttatttttgttctattgacgtccctgatcggatcgccgtcaaactctttccagtcccaacggtcttcaggaatgtctgtaatcatatcccgccctttttcaattccttcccaaaagtcttccagcgtatctgtttgggggaaacggccgcttattcccactattgcaaccggctcattcatatgtctttcctcttgcctggttttgttttcaggctcaggggaatgttcataggattccggcggaggcgtgctgtacaatgttttttcgtctgctgcagaaaaaggttctgtctcagcaaaaaggatttctccgtattgctcgattacataatcagtcagttcagccagtgaattgcattcaaagaaaatggacggcaataattccgtaccatattgttgattgatttcatttccgagtctggtaaacgtaatagaatcaaatccgtactcgccgaatgaagtctcttcttccatttcctttctgtcaatctttaaaatactggacatcatctttgcgatgccctcaatcagattttctctcctgtctttcgccgcagattcatctgaagaaaaagatccgcagagatgaagctcttcggaatactcactctttaaaaactcaagaagttcattaaaatcagtaagaccgaaaaaatctgacggcatcattgatattcctaatgtttcgtttaattcgttgcccagcattgtaaacataattgaatcaaatccgtattcacttatcggcagttcaaaatcaaattcccgttcttcaatttttaatacgccggtgatgatgcgcgtcaaagtgctttttaaagattcagttattgacagctctttcggttcgtgattttcgtcggcgattgccgggtcactttttccgctgtcaatcgttatcattcgttccagctttaattcattaccgctaaataccattatttgatgttcacaccctgtcattgcttgatcaaatgctgcaaggccttcccgttttcccagaggcagcattccgaaacggtcataaaggaacttctctgaatgaatgtcaatttgcataccgccttctttccataaaggccaattaatcgagactgtttttccaggtttattttccgccgctctcatttccgcaaagtaatccataaaccggtttgcataagcataatcagtttgtccggcattcccgattattgcgctgatagatgaaaacataacaaaaaagtccagaggttctctgtctgtataccggtcaagccatatcgttccgtaaaccttgctggccaggactgaatcgagatcctcttcacgcttattgatgagtaatgaatcttttatcacaccggcgctgtgaataactcctttaacaggacctaatttgtttttgacgagttttatcaggttgttgacattttccttatcagaaatatcggtttttacataaaaaacttctgatccgtttttttcgagctcttttacattgcttacggcttcctcagaaagctctgacctgccgataagcacaagctttattctcccttttcgcacaagatgtctggcaaaaatcaggcccaggccgcctgttcctcctgtaataaggtaaactcccccttcttttacttccatctttttggggggctctgccctttcaatttctgcagagtgtttcacctgcctgattccatctctgtatctgatctctgaagcatcatcgctgatgactgtttctttcacaaggttttttaattcaggcagaccggtgttcagctgtaactgaatttcatcgctgtgtatttcaatatttttaccggacaacattggatgttctaaatgaagcgacctaaaaaagccgctgattgccatttgataaggtaagatttgattgttccttgtgaaaaatacatgtgatatcagaattttatgtcttgggattgttgctaacagagctttcgttacattgaaaaccggcaaaacagcctcttccagcttttcatgaatgttatgctcaattcccgtttcagggctcatcccgattaaaatgacgcggtcaattgtcacttgtctttctttaagaatcgccagcaatttcttatagccttcaagtttgacgctgttcaattcaaaggaatcagcttctttttcttgaaaacttccgccatggcggacaaagatcatgttcaggccgatatctttatatgcctggcggatcagcggttctgatatatcctgacggagtgaaattacaaggcagctgtttaaaccgctgccttcaggctgatgaagcataggggcccgcttccacatatcagagtaatacttagctgaatgccgctcattttgagtctgcggtgcagcccttaatgccttcaacgctaagttttttattttaagacttacagatccgtgttcatccataaatagtatatgaaaccttttgacatcatcatgttgtctttcatcggcagctgtaatgtaagcatagccgcttgccgaaggtggttgaagaatttccagctcacctaattcaaaaggcaaatatgcggtatgatcgtcttcctgaccggacgtaaacccgattgtggattgaaaaatgccatccaataaacacggttccagcagcccgccggattttttatcaatgctctcaggaagtgatattcgtgcaagaacagcattttcatggataagcagctgttttattacctgaaagccggctccatagtccaaaccgctctgccggaagtttctataacactcagcgccgctgattaatcttttctgtccggttaaccagctgtccaatttaaaatgctctgtatgagaggcgtctttatctccgcatgtcataatgtttccttggcaatgaactgccgcttcagattgcatatcggttttcaccacaaatctgccgtctttttgattcggcagcagatctatcattatcgtcttttctttttcaacggttatcggaaccgcccatacaacctgactcagttttatgactgattttccgtacagcctctctcccgcttctctggccgcttcgatgattgccgctccgggcagaaccatattcccatgcacaacatggtcttttaaataatattcagaatctgaaagcgttttataaaatcggcactcaccggcagaaaaatcaaataaaggagctgtaccggctgctgatgttgtttgcgccttatttgacacccacagtctgttttttaagaaagggtaagtcggcagcgcaatttttgccggttttctgccggtgcggaaatcttcccagcttaaactccctcccgatacccagaattcagccatgtcggctaatgtggttctgccggaattgagcggaagatccgattgccgctgtccgcgtttatgattcggttttttccctctgaatatttcgtgatcgtcaattccattataaaagtgatttaatttcaacatcaggtcatcgatatttttcgaaatgacagcaagcctttccggcatggcttcccgcccttcaagaagggtatatgcaatatcagaaaggtgaagcggcttatttgttcccgccggctgtaaacactcgccctgcttatgacgagccttttgaagatattcctccagcttttttgctgattcccgtaaactcagtgaatgcttggctgagagtacgataagttcttcactttcctcacgccccgtttgacagtcagcagcagactcatactcttccacaagaatatgagcatttgccccgcccgctccgaaagaacttaatcccgcacgccgcggatatttgctgtcagaatgtttttcattcgcgggttttatccagtcggcagtttcctgctggagacaaaaaggtgtctcttccagataaagatccggatgcacccgttcagcatgcagtgttgcggctatttttttatacttcatttgtaaaataatctttgtcaggccggcaatacccgcggccgcttcgagatgaccgatgttagatttaatcgatccgagagagcaatatgaaacatcttcggtataagctctgaacgccttggtcagacctcggacttcaatcgggtcacccagcggcgttcccgtgccgtgtgcttcaataaagctgacacttctggcgctccaaccggccgctttaagagctccttgaattaaatccgcctgtgcggcaggattaggcaccgtatagccattcgtctttccgccatggttaattgccgttccttttatgacggcgtacacagtatcattatcacgtatggcatctttaagcggtttaagaataacggccccgacaccttctccgggcacgaaaccgtcgccgccttctccaaaacttctgcattttcccgattttgaaagcattcccatctgacaccggtataaatagtcagaaggatgaagatacaaatttactcctcccgcaaccgcaaccgagcactcacctttttttaaactttggcaagccatgtgaattgccgttaaggatgaagagcaagccgtatctacagggatactgggacccgtaaaatcaaatgtgtaagacactctgttcgcgagagaccacgggaacgaatttggaagtacatcgtttttgtccgtcggtattctttcgccgagcagcttgtaagaattggttgtaactcccgcaaatacaccgacatgtttttcggtctgctttctcaacccttcaatggtatatcccgaatcttcaaatgctttccatacggtttcgagaaatattcgttcctgaggatccatcgcttctgcttctctcggcgatatttggaaaaacaaagaatcaaatgattcagcattctttaaaaatccgccccatttgcaataaattttcccctcatgcgctttagcgggatctggatcatagtaggtctcataattccatcgttctttcggaatttctgtgattgaggttctctcttttgatagaagatcccacaattcttcgatattttcagccccgggataacggccgctgataccgattaccgctatcccgtcaagatgttctttttcctccgccgcagatgcagtggtgttttgttccggcctggcgggggtaatgctctgaatctgttttcctttttcctcccgtgaaaataaacgtcccagccgatccgggtattcttttacaagatgatctgctaaatctctgattgtatgaaattcaaataaaagcgttttcgaaattgctcccagtgactgctccagctttgtgttgcattgatgaatcataacggaatccattccatattcagccagatgcacatcttgatcgatctcttcccgttctgcaccgacctcacaggagatgatattggttaaaaacaaaactgtctgatccaaaatatcgccttgagccaaaggaacggcactgcctgtctctgtttcgtccgtcaaaaatctctgctgcataaattgttcaaagcgttcatgatcaccgcagactgcaatattatgcagctgacccgaagttacaatccgcgaaaaccattgcgttccgtcttcagcaggaagttcttcgagccctgaaccatgaaaaagagacgtccgcccttgacctgacaggttcgcccccattccgatgtcttgccataaaggccaattgattgtcagggtgcggccgctgcgcagagaattttgccgtttctgttcccgatattcggcaaaatgatctaaaaagccgtttgcatatgcataatcacactgaccttcgttgcctgcaatagagacgactgaagaaaaaacggcgaaaaaatctaattcgagcgacttcgttgcatgatcaagattcaatgcgccatgaactttcggagcaatcacctctgaaagttcatgctttgtttttcgaaaaagcagcgagtctctgataactcctgcacaatgaatgacgccatgaagacctgcatgctgatcggtaataccgtcaatcattttttttaccgcttctttatcggatatattcgcctgtatataataaaccttggctttaaagctgttcaggtattctaaatgtttctgcttatctccgtttaaaacagatcgccccgataggataatggtggatctttcagttttcgcgcaatattcagcgattttactgccaatccccccaaatccccctgtaattaaatatactttatctttttcagggtattgaatggtctttctgtttgtttctctctgcttctctaacatccgtgcatatcttacgcagcctctgtaagtgatatgaatatgccgatcaggcgctgtgtttatttctttataaagaatgtcagccttctctgaacatgaaacggatgcagaatcatgttcaaagcaaaccgtcttacaatgcagctgcgggtactcttgttttaccgattttaaaaaaccgttcacaccttcaaaatacggcaatttttctttttgatctgcgctgaatgtataaatgaacgttactttgtttataaggttctcgctgattaaagccttagtcagataaaacacagaataaattcctgatgcgagtgtttcttccagttcaggctgtttttcagaccaagtatgcaaaattgcatcgggcgctgcgcctttttcctttaacagacgaatgacaccttgataatcttcgggacactgcctgttgatggtgaaaacactgtcgcttatctgctctaaacggtcaccgggcataataagatatgcggacgtattctctctttttttcagctcttcaaaatagtctttattcccggagaacaacaaaatagtacaggcttgtccgctgcccgcttcattctcaagtgcggtttctttccataccggcgtataaagtgcctgattcttcttttctgaaaaagccgcgtctgattttaccggctgagggtttaaagaaaattgagagcgctcaaacggataaggcggaagcggggcttttcttttatgataatcacctagtttcgcccattcaatctcttctcctgaaagccacatttgcataaatgaatgataaagagcctcatcagctggtttgtccgcttcaaaagcagccgctttgtttagttttgctgatggagggagcgatccgaattgaaaaactgaaaaatcagagatattcacatccggctccgttcccttttcttccgtgtgaagcggcatatggtcagctatctcctgaaacacggcatccatctgattgtattctgtcatcagcggaaaacgggccttatcataaaaacctgccggctgctcattcatacaagcaacagcctgtttaattccgtcttgctttttcaataacatgctcagaaaaagttctttagacaagattccttcatccagtaaatttaatatttccagaacataatcattatcaaagaatccatcataatctgttaaatcccatctcttatacagtcttctcatagaggcaaggatagccatgatcgccgcttcctcttcagccggcaatgcgtttcttttatccgccgtgcgattcacaatataagataaaatctcgatttcctgagtctttcccgctttatcccactcttctaaaaaccctttaaacgtatattggtgctcaagaagcagccgtgttttcccgtacaggcggtctgtaaaatcagccgggaagctcagaccgttcagcagcatccttacatattcttcatttaatcgaaccggcgggtacgtttttgaagtgtacggattgacaaatggaatggacggcggctcgcaggataagtgcgaaggtttttcagcgcctgtgatgacagaaatggccttttcaattttgatgatatccgctgctgcaagagcgacgtaatatccgtctccggcgcctgtaatgagacttggcttaaaaccggatgccaggatactttttatgatttccgtattgataactaaagaatacaagcggattttctcaggcgtccattttcttttaaatgaactgtgcaatgctggtatacccttcagcaccgaccttacgttcttttctagatcagggaacacgcgtttcaaaacggcaaattgtttataactttcccatttgaagtcaccgatggcaagcgcccattcagaatcatgtttcctccgaaaacttaatccctctttaagctgatttttaaattcctccttgctgcctgccaataaacccgccctgtaatcaaacgatgtccttgttaaaagggtgctgctgatcgcttcatttgatattttgcaaaattcctcagaatcgtcagaaaaggttctccaattatgtatcatttgtttcatgctttcttcacttttagcggaaaaaaggaagggagcccttacctttctgtcagtttcgtcatttgtatgtataaattcttcgatgatgacgtgagagttaacacccccaaaaccgaaggagctgattcccgccctgagcggagccccgtctgccgccttccaatcacttgaatcaagcgccggcctaaacggtgttttttcaaactgtataattggatttaccgtatgtacattcaggcttttcggcaccctccgatgtttcatcatcattagaacttttatcaatccggccattcccgccgctgcttctgtatgaccgatatttgttttcacacttccgattctgcaatattgagtatcctcagtatattgccgatatgcttttgtcaatgcttctatttctatcggatcgcccagagatgtacctgtaccatgtgcttctacataagaaaccgtcgcagcatcaacagcagcgttgtgtaaagcttctgagatgacccggcactgcgcttctgctctgggagcggttatggaacgggatttaccgccatgattaacagccgtcccttttatgatcccgtatatatggtgaccggcttttactgcatcaccaaggcgctgcagcaatacaacgcctgccccttctccgggaacgtacccgttcgccgctgcgtcaaaggttttacatttgccgtcaggactcagcattctggctttagaaaaagaaatatattttccgggttggaaattcaagtttactcccgatgcaattgcataatcgctttcttttgtccgcaatgacttaaccgcttcatgtaaagcaacaagcgacgatgcacaagcggcatttacagacatgctttttccggtcaaaccgaatgtgtatgaaagccggttggagagcatagcttcgaaacttcctaaacaggcgtaactgtcgatttccgattcatgacctgtctgccggtagtcagaattcataatacccgcaaaaacagaagtggttttacgctggagatcccgcaaagagaccccggaatcttcgatgcaccgccaagtttcttctaaaaggattctttgctcaggatccatgtttttcgcttcccggggagagatattaaaaaacttatggtcgaaatggtcagctttatgaataaaacctccccacttgctgattgttttgttcggtatactgatatcagctgagtaataaagatcgggatcccaccgttcaatcggcacttcccggatggaatctttgccgctatttatgttttcccagaattcatgataatgatctgcatcggggaatctgcaagcaaccccgattatcgcgatatccgcactctgtttattcaaatgaaccattggcctccacccgcccctttttagtgtagaaataacgtatccaatctgcgtcttagcagactttcggtctcattcatcattttttcaccaatgtcatcgacatgtctgtttctccatgattccaactccgtgccctttacccaatggttaaaagcgcctaaagacgggccgcaatgaacttggaaattcaccttttgttcttcctccccttccaaagcaagcagacatcctctctgcaaataccacttaaatagtaacagcatcttatatttttgattgcgctccgctttttgggccaggttcggctgtttttctattatgctttcgtagatttcatcaaaagtcttattaaaataaacattttcgagctgaatctttgtctcttcatctatctcactcaaagactcatattgttggtagatttgaaataatttatttgccctgaccggaaacagcgtgccctttttcagcacctgaacctttgttccgaactcaaacagagtctccgaaggcgcataagcagtatcgcatatttctgtctcactcagcatttctttaacaaaaccgcttgttgcggcttcaactgtacattgattaatggatcccgtcataataaaatcagcgcccattaaaaaagcagacgccgcagactcgggagttccgattcctcccgcggccccgactctgatcttccttgcgtatttatgtgtttccatcatttcatcccgcaggttaacaaaaaacggcagcatcgccgtcaatgagccctgttcggtattactgccgcaatctgcttcaataatgatatcgtctgctgacggaacacggctgagccactccgcctgctcttccgtcagcataccgtgctgacacattctctttacgatactttggggaggcggactcagaaatgcggccgcaacttccggccgtgaaactttggcaatgatccgattatgaggtatgaccctgccgcttttgtccatcttcaactgatgcgctttgtaataaattaatggcgcgctgacggaaagatacgaagacgcttctattacccgtacgtcatgcttgatatataaatctatcaattccttttctctatcttgatgatccggctcaaatcgcagattcattccgtagggctggccatttttgagtgtctccttaatagaaataagggcctgttcaatttcccttatagttaaacccgctgtgccaaagaaccccagcattcctttcttcccgaggcggatcagcatttcagcggaagagatccctctatgcatcgcacctgccaaatacgcgtatgtcaaaccgtaatcttctttgaaagattgatcacccaatcgggacaccggtgaagccgcaacgctttctatattttcggccatgaggcccttctctttcccgctttcggaattgtccttgttcccttcagaaaacaagagactgtcttttggcgcactaatattaagcggttcctcatctctttgtatggtttgaattaatttagtcagaatgtttccgggaccgatctcttcaaacacagtgacgccttgtcccattaagtacctgatgctttcagtccatttcaccgagtttgttatttgttcaattaaattccgtttgatatcttcttgtttataaggtcttgccgtatagttagagatgaccgggaaattcaattcagaaaaatgaaactccccgataaattccgcaaattcacgctgtgcactttccatgaaacgagaatgaaaagctccgccgacttgcaatacgatataagctttcgccccttctttttcaaaaaaagaggctgcacgctttatctcttctgcagcccctgctatcacaatttgtgaagatgtattgtaattggcgatatctatttggccgaattcatacttttgaagtattttttttatgtgatgctcatccagtccgatcacggcagccattccgccctcggaagcctcactcattaactcgcctcttttagcaaccagccggagacctgtttcaaaattaaaaacaccggccgcaaaaagcgcagtatattcacccagactatgtcctgcaacagcatcagggcgagtatgaccttcttttaaaccctttaaatattgcagtgcgctcactgtataaattgcaggttgtgtatacttcgtatcagtgagcctctctttttcatctgaaaggcataaatcctttatggagtatcctaaaatatgatctgcctttttaatgagctcactgaattcatcgaataagtctctgcccattcctttaaactgcgctccctgtccgggaaagacgtaagcaagcatttgttttcctccttgttccgtatttctgccgtttcttttcgttccgattgtgatttgtttaacatttttcacttcaatttttaaaattgtcatttactctaagcacccggcaccattacttaataagcattacgaagcaaaataaaaaaacctttatgccggataaaggtttaaaagcaaaaagcatgtacaaagatcatattgccgcaaataatagatagaattttctgataattaaaaccgcattttcattctgttttttatatatcaatataataaaaacatcccaacgtgccgaaacaacgattggttttatgtgaatatttccctaaataaatactataccatgatttacatgttgtcaatgggaaacacacgtatataccaattcttcagccgccatttacaggcggctgaactcggttgttatcagttcatcagcccatgccgatatgccttcactatactattcgcggaataatagttctttctctttgttgtagtctttagtaaattgattgaactcatctgcttgtttatgcactttttcgtaaactgagtttactttgccgatttgctcttccagctgcgataatgtgagctttttatctttaatcagtttataaaggtcctgatcaagtgaaatggctttttcgtactttttgtacaaaagatcataagatgcataccttttttccattaaagcgacagcatgcccggctttttcttttactttcttatcctttatttcttgagaagttttttttgcggattcaaatgctttttttgaatcatcaatactgtctttttctgctttcagatgtttttttcgctgatttgcattgctcagagcctgatcagacagtgtgacgattttcttgtaatcatccatattcagtttaaccgcgctgtcgtaaagcttgtgctcttttttctccaatttttccaatgttttctgctctttttgaaacggtttttccgcttgaacggctttttccatcgagtcatgaagcgattcaaccggatcttttcccccgcagcccgcaagcagcatacttgcggcgccgagcgctccgattcctgctaatacctttttttgaatcatattcacttaaaatcccccaatcttgacaatttccactatagaagcccgaacgctttttgacaatagctgagctgtaattggcatgaccgggtaaaaagatgcttacggtgctgtcaaagaatacttgcgtaaaaaattgagaaaacagggcggatgaccatacatctttttggcttttacatagtttatagtagacgccggccctgctgacaaagggtcagcgtaattaaaagaggaggtttttttatgtacggatatggatttggcggcggatttggcggcggatttggcggcggttgctgcggcggatacggttatggcggttacggttatggctgcggcggcggatatggccgcacattcgcattaatcgtcgtattgtttatcttattaatcatcgtcggtgccgcttatttaggctgcggctgctgaccttatacaccatgaaaatcggccggcctgctatggccggccaattgtttcgttgcgccgcgataaagaaattcgctataatttacatattaagctttaggagtgaagtttcttgattactatggaaaatattgtacgcgacggacatcccgcgctcagagagatcgctgaagaggttcagcttcccgcttccgacgaagaaaaacagcatcttgctgatatgattgagtttgtgaaaaacagccaaaatcctgaattagccgagaaatacaagcttcgtccgggcgtcggtcttgccgctccgcaaacagacgtaaaaaaacggatgatcgccgtccatgcagaagatgcgaaaggcactttatacagctatgctctttttaaccctaaaatcgtcagccactcagtggaaaaaagctacttgacgagcggagaaggctgcctgtcggtagacgaacccattcccggctatgtgccgcgctacgcccgcatccgcgtaaaggcggtgacgcttgaaggagaacagattgacatccgcctcaaaggttttccggccatcgtgtttcagcacgaaatcgatcatctgaacggcgtgatgttttacgatcatatcgataaagaaaatccgttcaaagaacctgaaaacgccattgccattgaccgttaaaaaaaccggcacttcccaaagtgccggttttctttatttcaaaaggcccagttctttgacggcccagctgattccctcttcatccaccggctttgtgacgaaatcggcggcagcttttaattccggaaccgcatttcccatcgccaccccggtgccggcaaaacggatcatctcaaggtcatttagtccgtcgccgaatgcataagtgtcacttacgccgtacggaagccgctcaagcactcttttaatgccttccgcttttgaaccgcctttcggaagcacatccgttgacaattcatgccagcggacgtaatcaaactccggaaaagcggcatatgctttttcttcatgtccgcggcagaataaaagcagctgataaatttcttttcctttataaaatgtttcatcaacttcgggataaggcgctttcagactgccgataccttccgagacgtgcggatgtccggggacggtcgttttcatcgtgtcttccgccataaatacgacggggtgctccccttctgccgcctgctttaataaacgcgcaaccgcatcttcaggaagcggatttttataaatgacctcaccttcaaatacgacatactggccgttgtatgaaataaatgattcaatctcaagctcttccagaatcggttttaccataaacggggaccttccgctggcgataaaaacgtgatgtccagcctctttaagcgccgtcacggcgtttcttgcgctatcgggaatatgtttatcatggtcatagatcgtgccgtcaatatcaaaaaagatcagttttggtttcatgtcaatttctcctttttcccgtttatcagtcgtgtctttttcaatatcatcatacagaaagtttttcttccggaaaaccgccttgatgaaattccagttttacccacgaaaacaaattcattttttccgcatactactgctataaagggctttaaaggaggtatacgatgctgcgccgattacggaagaaactcagaagacagtggggcggaatgctccggaaaaaagtcatcgcatagaagggatctttcggtttttgaaagtcccttttttgctcgagactttccttataatccgttttcgaatataatagaatcagcgagtctaacatacggcatttaaggagagatttggatgatttataaggtattttatcaagagaaggctgacgaagtacctgttcgggaaaaaacagattcactttacattgagggcgtttcagaacgggacgtcagaacgaaactgaaagatcagaaatacaacattgaatttgttcagcctgtggacggtgcttttttagaatatgagaagcagagcgaaaattttaaagtattggagttatgagcggaatgaaatttgtaaaaaatgaccagactgccgttttcgccctcggcggattgggcgagatcgggaaaaatacgtacggggtgcagtttcaggatgaaattgtactgattgatgcgggaatcaagttcccggaagatgaacttctcggcattgattacgtaatccccgattacacgtatttagtaaaaaatgaagataaaattaaaggtctgtttatcacccacggtcatgaagaccatatcggcggtattccgtacctgctcagacaagtaaatattcccgtttacggcggtaaactcgcgatcggcttacttcggaataaacttgaagagcacgggctgttaagacagaccaaattaaacatcatcggtgaagacgacatcgtgaagttccgcaagacgtctgtatccttcttcagaacgacacacagcattccggattcatacggaatcgtcgtcaaaacaccgccgggcaatatcgtacataccggggactttaagttcgatttcacaccggtaggcgaaccggccaacttgacaaagatggctgaaatcgggaaagaaggcgttttgtgcctgctttctgacagtacaaacagtgaggtgcctgatttcaccatgtcagaacgccgcgtaggcgaaagcattcacgatattttccgaaaagtggacggcagaattatatttgcgacattcgcttcgaatatacaccgtcttcagcaggtgattgaagcagccgttttaaacggcagaaaagttgccgtattcggacgcagtatggaatcggctattgaaatcggacaaaatctcggttacattacctgtcctaaaaatacgtttattgagcataacgaaatcaatcgtatgcctgccaataaggtaacgattttatgtacggggagccaaggtgaaccgatggcggcgttatcacgcatcgctaacgggacgcaccggcagatttccattaatcccggagatacggtcgtcttttcttcctctccgatacccggaaacacaatcagcgtaagccgcaccatcaaccagctgtaccgtgcgggcgcagaagtcattcacggttcattgaatgacattcatacatccggacacggcggacaggaagagcagaaattaatgctccgcctgatcaaaccgaagttctttatgccgattcacggtgagtacagaatgcagaaaatgcacgtcaaactcgcgactgattgcggcatacctgaagaaaactgttttatcatggataatggcgaagtgctggccctcaaaggcgaagaagccgctgtggcaggcaaaattccgtcaggctccgtttacattgacggaagcggaatcggtgatatcggcaatatcgtgctccgcgaccgtcgcattctttcagaagaaggccttgttatcgttgttgtcagcatcaatatggacgactttaaggtttcggcgggacctgatttaatctcaagaggttttgtatatatgagagaatccggtgatttgatcaatgacgcgcagcagctcatttcaaaccatctggagaaagtaatggatcggaaaacaacgcagtggtccgaaattaaaaacgaaattaccgatacgcttgctccgttcctatacgaaaaaacaaaacgccgcccgatgatccttccgatcattatggaggtctaaaaaaactgcactcattacgagtgcagtttttttattgcagcggaatatgctgaaaggctttgacatcaaacagaccggccgccgtcattttaatatccggaatcaccggaagggctaaaaacgataaggtgagaaacggattgaaatcaccggtgaatccaagcagaggaagcttttcatgaagcacgcccaagctgtcattaacccattccgccgacttatcagacaaaagcccggcgatcggaagcggaacggagtgaagcaattctccgtttttcacggctgttaatccgcccccggtgtcacggagcttgttgattgcttttgccaaatcggcatcgtttgtaccgacggcgatgatattatgggaatcgtgagaaatggttgtggcgatggcgccttcttttaacccgaacccttgtacaatcccgagtcctatcattttttcgccgctgtgccgctctgcgacggcgatttttaataaatcattatctgtatcaggtcgaaacgcgtcagcagacggtgcaggcacttctttttttctcgtctccaaatgattcggtatcatttcgattacattcattttcctgccctcttgaatcggtatatgaaaatccgattcagtcagcggcgctttcagccgcactgtatccaacagtgcctggtccggcgaataggaaccggcagactgttcataaaccgtccgtccgttctcggcaacggtccggccggcgaccatggtcttcgtgacggcagcctcccgtacatctgaaatgaacagcagatctgcgtcaaaacccggcgctaccgccccttttgtttcaaggccgtagcactcagccgcatttaagctggcgagctgatacgcaaggaatggatcaagtcccgcctttatcgccattttgacttggtggttcacacttccttctgtaagcagatcatctacatgcttatcatccgtacaaaagaaaaagcggcgcgcgtttttttcattcaccgccggcagcacgttgagcgtattttttgccaccgatccttcgcgcagcatgacgtacattccccgtctgattctgtccagcgcttcttcttttgtcgtcacttcatgatcatttgacaccattgcggttctgtatatattgatgatatctgaagacagtccggctaaatgcccgtcgatccgctttccgtgacgcttggcatcaagcagtttctgaagcatatcctcttcaccttccgcaacagacacataatccattacttccgcaagcccgagcacctctttctcctgataaaaaggctttaaatcctcggcttttaatacagctcctgagcgttcaaagctagcggcgggaacacaggaaggaagcatgaaacggatgttcagcggcgcctttttcgcctgctctatcataaatgaaatgccttttgctccggaaacgttcgcaatttcgtgaggatcagtaatgacagtagtcactccgtgagggaggacggctttagcaaattcaatcggagtaaccatagaggactcgatatgaacatgtccgtcaataaagcccggaacgatcatttggccttctgcatcaatgacttcttccccttcatattcgcccagcccgacgatcactccgcccgtaatggcgatatctgcagaaatccattcctggttaaatacatccatgatttttccgtttttaatgacggtatcggctttttgtctgccggctgatgcattcagccgttcagccagtgtttctttgttcaaaatgcggcctcctctttttctttatatggtacaatatgctatcggatcgcctgatcatagtcaataaaaattgcagaatataccgcttacatgataaatgtctttctattctgacataataaaagaccgtccttttacggacggcttttcactttgtatgaagcactcttttttcaaatcgggaaatgtccgtaagagagccgataacgatgagaatatcttctttttggatcatttcagtcgccagcggagatacgatcacttctttttctctcttgatggccacgatattaatgccgtacttcgcccggatgtccagatcaagcagtgtgttgcccgcaagcctgctgttggccacgatctccacaatgctgtgttcgtcggacagctccaaataatcaagcacattatttgatacgatgttgtgggcgatgcgttttgccatgtcacgttcagggtggacgatgtgatcggccccgattttcgcaagtactttctcatgataatcgttctgcgctttaaccgtgatcgtgttcacgccgagttcctttaagatcagcgtcgttaaaatgctcgcctgtatattttcgccgattgccacaatgacgtggtcaaagttgcgcagccccaagtttttcagcaccgattcatcggttgaatcgccgatgaccgcgtgtgatgcgattttggcgtattcatttactttatcttcatcaatatccatcgccatgacctcaaggccttcttcacttaatgctttgcaaatacttccgccgaagcgtccgagaccgataacggcaaactcttttctcataacagtactcctttaaacaatatctctaataggaatagtatcacattttcggcaatgagttcatatagcgtttaagcttttctgaaaaggcgggtgataaatacaggtccgctccgcgttcgatttcttcctgatagtgacccggaggcgcaatttcctccgctttatcaagaaccagaaacgtcaggacgcctctgtatacacggccgccggcacacacttctatgaacgcgggacggtatgtgtgattatcaacaccttctcttttgtacagataggttgccgcttcaaacgggagcttgtacagcacgccttcagttcgtcccccgtcttcaacaagatcggctctggaaccgtcaggacgccttaacgtgaatctcgtcgaatacccttcaacaaccgcccctccgaccggctcggcaaagaagtggtcgacccccgcctgtttaaaccgggcattgtccatacaggagccgtaagcgaaataataaaccggactgtcatcctcccgtttcataaaacggtattctttccagtctccgcttttgatacggctgaatgaggcacactggccgggctttacgacatatgcgaaggcggttttattcccggcatccgtcgtcacggcaacctctttccggtcaaaatcagcataatacatatccagcttacggatcatctgatgatctgtttcatacaattccccgtacacaaaagctgtttctgctaaagacgccgcaggctgacctttatccgtttcgtacagcacaccgtttatcgcggcctgctcgcacacacatagagcgcctttcagcagttcatggttttcttcacgcttccgtaacaaaccgtatacaaaaagaagcaagttatttttcctccttttggacagcagccgcttctaacggcagaatcacctgaaacgtactgccttctccatttttgctcttaatgttaagtttaccattatgctccttcagaattcgtaaacaaatcggaagcccgagacccgttccctgatcttttgtggagaaaaacggtttcccgatattttcaagcttttctttcgacatgccgtttccttcatcctgtatgctgatcaccgcgtattcttcatcccgttctgtataaatatgaatattcccgccgtcaggcatcgcttcaatcgcatttttaataatattgataaatacctgtttcagctggttttcgtcaccgttgaccatacaggactcagtctgcctgaaatccttctcaatcacagtgttcgacagcaccgcgttcgtgtcaagaagcgtcgccacctgccttaaaatatggttgagatgatgagcggtaaacgtcacggtctgcggcttggcgagcagaagcagctcccccagcacgagatcaatccttttaatctccgaaaaaataatatcgaaataatccgttctttccggatactgggctttcatcagctggagaaagccgctgactgacgttaaaggatttcttacttcatgggcgattcctgccgcaagctccccggcaatggccagcttttgagattgcatggcaaggcgttcgttcgtttccagaagctcgtcgaccgcttttttccgttcactgatatcagacatcgtccccaggctcccgacaaatttctgtctgcggtcataatacagcttataatggacttctccccaaaagatcgtgccgtctcttttaatatatttggccgtaaacattcctgacggggactgctgcttgatttgggagataatataatcaatgatatgtttttcttttataaaataatcattatacatcgtgcccatacattcgctgatggagtggcccgtaatcgtcgtccaggcctgattcaaatatgtaatattcccttgtgaatccgtctgaaaaacgatttcctgcagattgtccatgatccggtttttctcatctgaaagcgcctttgctttctgctcgctgtccttcagctccgccagcagctgctttttattgtccacataataagccagcagccagacgctgattaatgtgacggcggtaaaggtgatgtcaacgggccagttaatcggattccgttcaatcatataaaataaataatcccaaaacataataaaaatcattgccaagattaaggaaatgatacgcgcttgatattttcccatagtcccacctgccgctaacatttctacatatattgtaacattgttgactgcattattgactaaaaaatgataactattcccaattaattgagcaggttcgcttacttttcccgtgagtttttgcacaagttcataataaaaggacggaatgatgccccgccctttttgctgattatgatctatcttttaacgcttcttcgatttcctcaagcagcattttcgctccttcaggacttaaaataattttgccgttgccgtactcctgattttcggaggtaatttccccggtcatcaagcaaatgccgtgcggcttgtatttttttaagacaattttgtctccgtcaacgaaaaattcaatactatctttaatagcgatatccaatgctcttcgcaattcaatcggcatgacaatacgcccgagttcgtctacttttcttactacaccaattgatttcatagaaatcccctacttcctttaatgtctcttctttatgtccaaggaaaatccttcataaacgtagacgaaaggaacggagcaaaagtttctcagcatccggaaatgaatgttttttacaaaagaaagccttttgaaatacgggatacagactttccctccttttttacaaaaacatttcattcccggcggaaacccccaaaaatcgtggtttttctcagaaactttaaatgtagaatcaattaaatcaggatagggattgggtgaaaacatgtttcaatcaactgagatcggaatcgacttaggaaccgctaatatacttgtttacagtaaaaataaaggaattattttaaatgagccttccgttgtcgctgtagatacaacaacgaaagcggtgcttgccatcggaacggatgccaaaagcatgatcggaaagacgccggggaaaatcgtcgccgtacggccgatgaaagacggtgtcattgctgattatgatatgacaactgacttattaaaacacattatgaaaaaagccggaaaaaaaatcggaatgaccttccgcaaaccgaatgtcgtcgtctgcacgccttcaggctcaacggccgttgaacgccgcgccatcagtgacgctgtcaaaaactgcggagcgaaaaacgttcacttgattgaagaacccgtagccgctgcaatcggggccgacctccctgttgacgagccggtcgcaaacgtcgtcgtagatatcggcggcggtacgactgaagtcgccatcatctcattcgggggcgtcgtatcctgccactcgatcagaatcggcggcgaccagcttgatgaagatatcgcctcgttcgtcagaaaaaaatacaacctgctgatcggggaacgcacggcagaacaagtgaaaatggaaatcggatttgcattgatcgaacatgtgccggaaacgatggaaatccgcgggcgtgacctcgtaaccggtctgccgaagacaatcagactgcagtctaatgaaattcagcacgcgatgcgtgagtcgctcctgcatattcttgaagcgatcagagcgacgcttgaagattgtccgccggagctcagcggtgatatcgttgaccgcggcgtcgtgttaaccggcggaggctcccttttaaacgggatgaaagaatggctgacagatgaaatcgtcgttcccgttcatttggcggcaaatccgcttgaatcagtggctatcggcactggacgttcattagacgtcatcgacaagctgcaaaaagcgattaaataataagattgtgcttcttttttctccggccggctcatattgtgagaactggagaaacattaaggaggaagcatatgcttagagatgtgggaagacgcgtagcagtagccgtcattttaagcggaattattttggggggtatgagcatttcactggccaatatgccccattctccggccggcggcgccgtaaaactgaatcatccgtaaagacgcagcaaaagctgtgtctttttcgtttgtgctccttcctttcctttatgaggcgatatttgatatgatgagaaaaaccgatgaggaggaatgaacgatgagttcgtttactgaaaagttaaatacatatgctcagctggcggtagaagtcggcgtcaatgtccaaaaaggacagcatgtcgtaatcaatgcctcaactgatgtccgggaacttgtcagactgcttgccaaacattcttatgaaaaaggcgcaaaaaacgtcaccgtaaattggcaggacgatgaactgtccagattaaaatacgagatggcaccttttgaagcgtttgaagagtatcctgaatgggaagcaaaaggaaaagaagagctcgcgaaaaaaggggctgcgtttatttctgtcgtctcatccgaccccgacctgttaaaaggcgctgacggcaaacggattgcagcgttccaaaaagccgccggaaaagcattgcatacatacagacaatatattcaatcagataaggtcagctggacggtgatcggagcggcttcaacaggctgggcgaaaaaagtgttcccggatcagccggaagaaacagccgttcagcttttatgggaagaaattttcaaaacaacccgcgtaaatgaagaaaaccctgtggcagcatggaaaaaacacgatcaaaatcttcatgaaaaagtggaacacctgaacaaaaaacattacagcgccctgcattatcaggctgaaggaacagacttaaccattgaactgccgaaaaaacatgtatgggcaggcgcgggaagcgtgaatgaaagcgggcacgaattcatggccaacatgccgacagaagaggttttcacccttccgcagcgtgacggggtgaacggcacggtttccagcacgaaaccgcttagctacggcggcaacattattgataacttcactcttacctttgaaaacgggcgcattgtcgatgtgaaagctgaaaaaggcgaggagattttaaaaggcatcgtcgaaaccgatgaaggctcacactatctcggtgaagtggccttagtgccgtacgattcaccgatttcacaatcaaatattttattttacaacacactgtacgatgaaaacgcctctaaccacttggcgatcggcagtgcgtatgcctttaatattgagggcggcaaacaaatgacacgggaagagcttgtcaaagagggcttaaatgaaagcattacacacgtagattttatggtcggttccaaagaaatgaatatcgacggcattaccgcggacggcaaaagagaaccgatcttcagaaacggaaactgggcattttaataaaaaaaaggaggcgatcaggcctcctttttatttcgcttcatacatttgcaagttggcgaagacggtttccaaaacaggtgtatcaattgacaagcctttcgctttctcaagcaaaaagccgtgtaaatgatcaccttccgtcaccctgcccttttccatatctctcagcatcgacgatttcatatggtaagacatgcttgtcaatgtgcgataactctcttcttccagaccaggatctttcgggatgccggcagccttgaaaatggctccgatttcagcaaagaggcgctttgccgtgctgcggccgccttctgtttctaaaatcggtccgaccggctgttgaaacagagtggtcactcccgcctgcgcggcaataaacatatattttttccaaatgtccttttcaatatccccgctgatgatgacatccgctttcacgcctgcaaatgcgttttccagctcattcatacgttctgtgcgctccccgttccattcaccgaaaacaaaacggtgggcagcgctcgtatgaagaatttcccctttgtcgttaagggcgctctcaataaagcagaggccgcccagcacctgccgttttgaaaaagcttcaaacagctggttatagtgcctgtatccgtttaaaaaaggaataatgaccgacgaaggcttgacaaacggtttgacatcccgaatgacgtcctgcaaagaatacgcttttgaagcgatgataacggcgtcaaatgctccttcttcgcccgccaacattaatttcggcttgattgaaacatcaccttttgcacttttgacggtcaaacccgtttcttgtaattgttccgcccgtttcttgcggacgagaaatgtaacgtcatttcccttttctgcaagacgcgcgccgatatatccgcccactcccccagctccgacaactaaaaacttcatgatgcattcctccgtctcttttcaatttatgtattcctttattgtaatgggaagtcagaagattgaaaacttttttcataaataaaaaagcagagtctcccctgcttctttattacgcgtatagctcttcaagctttttctgcacatccgcgttttcaagaaattcgtcataagacatttgtttgtcaacaatgcctttaggcgttaattcaatgatgcgattggcaattgtctgtacaaactgatggtcatgagatgaaaacagcatagcgcctttaaagctgattaagccgttgttaagcgctgtaatggattccaaatctaagtggtttgtcggttcatccagaattaagatattcgcgccggaaagcatcgcttttgaaagcatgcagcgtactttttctcctccggaaaggacgtttgattttttgttgacttcttctcctgagaacagcatgcgtcctaagaaaccgcgcagaaagctttcgctttggtcatgcggcgagtattggcggagccagtcgacaaggttcgcatcgctgccgtcaaaatattcgctgttgtctttagggaagtacgcctgagaagtggtcacgccccatttaaatgtgccgctgtctgcttccatttccccggaaatgattttaaacaatgtcgtaacggcaagttcgttgcggcccgtaaatgcgattttgtcttctctgttcataataaagctgacgttatcaagcaccttaaccccgtcaatcgtttttgttaagccttcaacccgcagcacgtcatttccgatctcgcgttccggcgtgaaattgacataaggataacggcgtgatgacggtttgatatcatcaagcgtgattttatcaaggagtttctttcttgatgtcgcctgctttgatttagaggcgttggcgctgaatctggccacgaactcctgaagctgtttaatctgctcttcttttttcttgttggcttcctgagaaagctttaaagcaagctggcttgattcataccagaaatcatagttgccgacgtacacttgaattttattaaaatcaagatcggcgatgtgcgtgcacactttatttaaaaagtgacggtcatgggatacgacgataactgtgttctcaaagttgattaaaaactcttccagccactgaatcgctttcagatccaagtggttggtcggttcatcaagcagcagaacgtccggcttgccgaacagcgcctgtgccaaaagcactttcaccttttctgaaccgcctaagtcggccattttcttcgtatgcaggtcttcagagatgcccagcccctttaacaaaatagcggcttcactttcagcttcccatccgtttaattccgcaaactctccttcaagctcagcggcgcggatgccgtcttcatctgaaaaatcaggcttcatataaatcgcgtctttttcctgcatgacttcgtataaacgtttatgtcccataatgacgactttcagcacttcgcagtcttcatattcaaagtggttctgcttcagaatggcaagacgttcgcccggactcatatggacatcgccggtctgaggctccagctcaccggataaaattttcaaaaatgttgattttccggcaccgtttgcgcctattaatccgtagcagttgcccggcgtaaatttaatattgacatcttcaaataacttgcgatccgcaaaacgcaagctcacattatttacagcaatcatttagaatcctccatcgtgtctatcatcattaaaagtataccatgaataaaggggaagagaaatgtttccctgcgaatatacgggtttgaaaagatgcaggcgtcaaacccggagcgctgtgatacaatagatatatatacatattcatcacggaggaacaagttgaagcttttaacactcacagaatactgtcttatgattttcttcaccggggtttttctggccgtcacaggctttacggcacgtgacatcggcttgtacgtcggaatcgccctcatttatacgttttcgcatctcttttccaaacggatgcttgaaagacgcggcaaagagaagaagcaggtgaatctttttttcagcgttctggccattgtcggatcagtgctggccacggtattgttcatcgccgtcgcggcctcgtttgccaaataaaaacgcctgctgtccgaatcgggcagcgcggcgtttttattttgtctgacgcatatcatgaaacgggaagaacacaaacttcgaggtgccgacgatccggttttcggcaattaagccgaggccgttccggctgtccattgagttcagccgattgtcgcccatgacaaagtatttgcctttcggaacctttacggggccgaaatctcccgtcaggttgactcccagttttttcgcttcttttttattgctcgcgaggtacggttctgcgatttttttgccgtttatgtaaagcgtgtcatttttcatttccaccgtttctcccggttttccgatgagccgctttacataatggactttcgatgtatcgccgttaataatgacgatgtccccccgctcgatttctccgatataattgacgcttttgttgacaaacagtctttcaccgtcatgtaatgtcgggtacattgatgatccttccactaagtacggttcaaacaggaaatggcggattaacagcgcaagtgcaaccgctataatgatggcctttccccattcccaatacgtgttggattttctttttaccgatttttcagaagtaggtttttgttcttcagtcaacgtggttcctcctagacgatcactgtttcggttcatgtaccatctttactttatcacaactcatcacaaaatacataacgcttctatgcgtatatgattgaaaaaagcgcccgtaaaggacgcttttcgcttatttctctactaccggttttttgatgattcccaagataaccgccgttacaatcgctccgatcacgatgctcattaagtaaagcagcggatggttcgtaatgaatgcaacgaatatccctccgtgcggtgcaggaagcgttacccggaaaaactctgtcagtccgcccgctaccgcagaaccgacaacggctgcagggatgacgcgaagcggatcagccgctgcaaacgggatggcgccttctgtaacgaaagctgctcccatgaagtagcacgtaataccggcttcacggtcacgtttagagaatttgtgtttaaagaatgttgtcgccagtgcgattccaagcggcggagccattccgcccgccatgatggccgcatgcggcgcatagtttccggcatcgatcatcgcgataccgaaagtgaacgccgctttattgagcgggccgcccatgtcgatagccatcataccgcctaaaataatacccattaagacaaggtttccagttccaaggctttcaagccaatttgttaagaaattcataaacgctgctacaggtgtgttaatgacaaactgcatcaggacaccggtgataaaaataccgagcagcggataaatcaatacaggttttaatccgtcaagagtctgaggaataaagacaaacagctttttcaaaaggactacgacataaccggctaagaatcccgcaatcagtccgcccaagaatccggcattcgcctgcgtagccataaatccgccgaccatacccggcgcaaatcccggacggtccgcaatactcattgcgatgaatccggcaagtactgcaacaatcagctttaacgcattaccgtcaccgataaagttcagcgctgcagcaaacgtgttgtatgtcgggtctttcggatcagctgaatgaattccccagaagaatgaaatcgcaacgagaattccgccgccgacgacaaatggcagcatgttgctgacaccgctcattaagtgtttatagaaagtacttccgatgcttgtgcctgatttctgtttcggaccgtcttcatttgaagcggaagatcctccgccgctgccctcgtaaatcggcgcatcttggttaacggctttttcaatcagttcctgtggacgtctgataccggccgtcacaggcacttgaagaacatgtttgcctttaaagcgctccatttcaacctgtttatcagccgccacgataatcgcaggcgcgtcttcaatttcttgagccgtcagcttatgtttaataccgcttgagccgtttgtctcgactttaatgtcaacgccgagctctttcgctttttctttcagtgcgtcagctgccatgaacgtatgagcgatacctgtcgggcatgccgtaaccgcaaggattttcccttttcctgacggcgctgcctgttcttcctgctcttcttcttcctcatcgtcatctttgtcatgctgattgatgatgtcaatgatcgcatcttctgattcagcttcaagaagctgtttgcggatttcctcacgcataagaagcgttgaaagtcttgataatgcctcaaggtgcgtattgttcgctccttcggttgccgcaatcataaagaccaagtgtgccggctgaccgtctaatgattcataatccacaccatcttttgaacggccgaatgcaatggccgggttaatgacgctcgccgtcttcgcgtgaggaatggcaataccttcgccgattcccgtcgagctttggctttcacgatttaaaatggctgctttgtaagcctctctgtcatttaatctgccggctttgtcaagcactgtcaccatttcatcgataacgttttctttctctttgctttctatattgagatgaattgtatctcttgttaacagctcagttatcttcacttttctttcctcctctatagacgtgtgactttaacttcaggaagaagctgctgtacaaactcttcagttccgagttcttcagaaaatgccgtcgcgcttccggaagcaactcctaaacggaacgcatcttccaaaggcagctgttttgaaattcccgcaaggaatcccgcgacgacggaatcacctgcgcctaccgaattgacaagctttcctttaggaacattggcgaggaaaaccgcctctttcgtaaataaaagcgcaccgtcgccagccatcgaaacaatcgcgtgttcagcgccttgttcaattaattttttaccgtaaggaacggcagcttcggctgaatcaatgaccgtattgaacatttccccaagctcatgatgattcggcttcatcaaaaacggtttcatttctgtcgctttcatcagcgcttcaccggagatgtccaccactacccgggcattctgctttctgcatgcctcagcaattttttcatacgtgttatgcggcagggaagaagggatgcttcccgctaaaacgacgatgtctccctcttccagagcggagaactgttctaaaaaggcattgaacacttcgtctgaaatcgtcgggccctgtccgttaatttccgtttcatcgcccgttttcagttttacatttatacgcgtgtcttcatccacctcagaaaaagccgtttccagaccttcctgctgcaaaaatgacgtgatataatttccggtaaatccgccgacaaaccccaatgcttttgacggcacatggtgtcttttcagtaatctcgaaacgttgatgccttttccgccgggatacttcgtgtcatagctggaacggtttaaaccgcctacggcaaaatcttcaacgtgaacgatatagtcaacagacggattgagagttacagtgtaaatcatggtttcactacctttacgacagttttttcttggtaatcatcgaatgcaagttcttcagcttcagtggtaatgatagctgcatcgcccaaggcggcgaacgctgcgaaagaaatctcgccgaatttagaaggatcggctaaaacatacgcatttttcgcctgtctcacagcctttgtcttcagaagagcctcatccggatcgggtgttgtaaagccggcttcaatgtgcacgccgttcaccccgagaaagcttttgtcaaaacggtactggctgaccgccgttaatgaggcgccgccgatcatcgcacctgttctatgcttcacatatcctccgagaagataaaaaggaatccccttccttattaaagcatcgatatgcataaccccgtttgtgacaaccacaatgtcctttgtatgatctataaaatcaatcatgtgcaatgtagttgttcccgcatcaaggtaaatacagtcaccttcttctaataaagatgccgcttcttcagcgatcttcagtttatcctgaaggtttttggaggatttttcaagcatatcgggttcttgcctgctgttggaaagtttagacgccccgccgtgaacgcgctttaaaaatccgcgctcttcaagtgttgataaatctcttctgatcgttgattcagaagcgtttgtcatgcttatcagctcttgaatcttcaccacatctcgcttttcaatctgatccataatcagctgatacctttcaggagtgagcatattccgcctcctttgaaaacgtattcatttcggctgcaagataattgtaaacgctttttttacttcaagcaactaaaatcactcaaattcattcaataactatcaaaatctttcacatttgttcatattaacgtatgtacatagggtttgtaaactgtaaattcgacaaaaagggggacaattgtatgacattttctttttatcataaatgaaaaaagtctattatattcattcaatcattaaaacacaaaaaaccccatgcagactgcatggggcgccggttattcataccgtaacgcttcaatcggatctaagcgtgatgctttgttggcgggcagcatgccgaagatgacgccaatcagcatactgaacagcacgccgatacaaaccacctgccaggaaacgagcgacggccagcctgcgataagggaaacgagtgttgctcccccgtagccgagaccgattccgattaagccgccgattaaagtaagcacaacagattcaattaagaattgtgtcagaatctgtcctctcgtggcaccgagcgatttgcggatgccgatttctcttgtccgttccgtcactgatacgagcataatattcatgaccccgatcccgccgacaacgagagaaataccggcgatcgaaccgatgatcgtcgtcataacggtcgtgacctgaccgattcccgccgcgatttcttccatattcatgacttgataggcctcttttgtaccgtgattgtcatttaagagacgggccgcttcttttcctgttgttttgatttgatcagcggactccgtctgaacggaaacgttgctgtagtcgttagtaccgaaagacgttttcagcatgttgaacggcacatacatttcactgagtcctaacgataaaaagccgctctcttctttcagtacgccgattacttctacgggctgtccgccggcccagacgattttcccgagcggagacgttttcccgaacagcttttcagccatttttttcgagatgattcccgctcttttcccggaaagaaaatcattgtccgtaaacgtccgtccatcttgaacgtccagcttttttacgtccaagtagccgctgttaatgccgttcagcgtaatatccgtgtcttcttcatggtaacgggccgtcatggattttaccgcggaagcgacaacctgctttacgccgtccactccttttaatccattaatatcttcttctgtaaaactcgcttgctgtaaggcgttcggattggctgttaattcttcatcactgggcatgtaaaacaattcaatcgtattgcccggcccgctgatggattgcttcagcatttgctctccgccctggccgacagccacaacaacgattactgaaccgacgccgataatgattccgagcattgtcagaatcgatctcagcttgtgagctcttacggaactgagggccatccggagattttctgacaggctcattcccccactctcctctgctcagaatcgcgggaaacgatcatgccgtcacggacgaaaatcactctgtttgtacagtccgccacttcaggctcatgagtgacaagaaccacggtcacgccctctgcattaagctctgtgaactgctccataatggaaatgcttgttttcgtatccagcgcgccggtcggttcatcagctaaaatgagcttcggttcgttcacgatggctcttgcaatcgcgacacgctgcttctggccgccggacagctcattcggcatgtgacgcatccgatccgccaaaccgactttttccagcgcgtgctcagcccgttcctcacgctcttttttgccgataccggcgtagatcatgggaagttcgacattttttcttgcattcaatcgcggcagcagctgaaactgctgaaagacaaaaccgattgatttgttccggaccgccgcaagctctttttcggtgcatgaagaaacatcttcgcccgcaagactgtaattgccggacgtcggtctgtccagacagccgatgatattcatgatcgtagattttcccgatcccgagggtcccataattgacacatattctccttcttcaatcgtcaggtcgattgaacggagaacatcaaacgtctccttgccgatctgatagctttttttcacctttgaaagctgaatcatctatgctttcacatccgttccgtcagtcaaaccgtcagccggattcagaatgactttatcatcctttgaaagcccctcttttatctccgtaagctgatttgcggtatcgccgactttaactttcacgcgtttggccttcccgtcttttaccgtaaagacccagtgctcatctccgtcttttttgactgcggaggacggcagcgtgtcggctttccgtttgtcggtttcaatgttcataattaatttaaatcccggcttgccttccggaaggtttccgatcagcttaacctgaaacggatactggacggcttgttccgtgctttcccccgaagcagcgcttgacttttgatccggaacgaggccgacagccgccactctccctttccacgttttaccggggatggcgtctgaggtgattgtaacgctttggccctttttcactttcagcgtgtcgtattcggacaaattgccggcaacgaccaggtgttccgggtctcctatatgtataaccggttcttgaatatccgattttttagaagccgcttcttgatttaccgagataaccgtcccgtccatctcactcttaacattgagattcgacacttgattttcaagagactgcttttgcaaatcagattgctttaattcgatttccgccgttttttgctgaagctgcagatcagtccgttcggattcaatttgttttttggcttccgcttctcccacttgttttgccagatcttgttccttgctgtttaatgctctgagtttttcttcaacttgttcgatttgcatccgttttgattgttctgtcaactcattttgttctttatcaaggttgagctgctcatttgtatacgtgactaacgacgaccctttttttactttgtcgccttcttttactttcactttatcaagagttcctttatctgcttcataaaaaacatactgttctttagaaaatttaagtgttcccggaaccataaccgtagatgagatttctctgttttccatggttccggtttcgattttttttccggcgctgccgcccgcgggagcggcagacttataaatattgataccgataaatactgcaacaattacggcgatgccgattccgatccaaatttttttcatgttatacacctgctgtcactgaacttaacagtcctccgactgccgaaaccaaaagcataataacaaacaggacaatcgcggaagtccaggccgcttttttcgaaatgccgcctgtatagcgaagtcccaaagccagcagaatatagctccagatgctgaaaatgtcgaacgcgcttaaaaagaccgcgacgccgtctccggccggtatgacactcgccaaagatgtaacggcgtacaatgagcccgcaccggtaaaataagtgacaagaccgttaataactaagccgatattggtaataaacgccgtaaacaggctgagtgagagcatttttttgtaagttgtcacgccgcctgacattttgacgcacagccagtaaatgagcggaacgataaacagagcgataatgcccccgaagattcctccgaacatcgtgccgaatttagcgaaggttttggtcatttcaatctgatcatccgtcaaaccgtcaagagatgagctgttcagcacttcttcataattcatccccagtccgcgcaaaatactgccggccgcgatgagaatgatgacaatcaggagaggtatgccgatgaccggcttttcttttaatcttttaaactgcacaacaggacttgtaatgacgccgaaaattgacggcttttccgtgactgccgcattgcttttttccaggtttggttccatatagctgatgcctcctatgtattattctgtttatacgtacgctttaggctgagagaagtttcaatttttttgccgtttgcgtatttatgctaaattgtaacacaaattctcagctttacgttccataattatgtaaaaaaaagcatcgtcagaccggtatgacgggtaactcaaaaccttgtaaaggcactgttatcagcctattcatgcagtgaaaaccgcctcaattgcaaaaccctttaaatcccatttagatattctctgaaattcagcgcctataaacaaaaaagccggatggcaatgatgcacatccggctcttttttcaccctccgcttacaggagggataaaggcaatggtatcaccttctgttacggtgctgttgtcttttacatatgtttcattgattgcgatcatggcattgtcaatcgtctgaaggccgtaccgttcctttaacagcgtttttacagcagacgctgccgtctctttttcgtcaagttcaatgaccggtgttcccgcctgctccgcaagcccggcaaataataatactttaatcatcgcgattcccctttatccaaatccggttttccgttcggatagggcgttgtttccagctgatcgcctatccattcttccccgtcttcccagatttcttttttccatatcggcacaatctgttttatccgttcaattgcatattcattcgcctcatatgccgcctttctgtgcggagaagacacagcgattacgaccgctgcttcaccgatatcaaggacgccgacacggtgagtgattgcagcttcggctccttcccatttcgcgctgatttcactgccgatttgagaaagcatttgaacagccatcggttcatacgcttcatattcgagacgcaccgtccgccgtcctgcagtccactctctgaccgtgccgataaacgttgtgatggccccggcttcacgcttttcaactttttttacgatattttccgcaatgataggttcccttgtaatttgaaaacgttccatttaagcagtttcccctttcagctgcgaaagcacaaacataatggcagcaggatcgtccgcatggaatacgggcttgcccgcatctgccggcatatgctccgtatttctgctgacaaccgcgatcacgcgctccaaatgcttcagcttttgccaatcttcgctgtttttgatcataatgattttcggatgcggcgcatgtttaaatccctctatgagaagaccgtcaattcccagacattcatacagactgatcaaacccgccagatcccatttttttcgcgccgtaagctgcaggacgccgtccccttctactgccgtaaccgcggctccggcttttgaaaaacgctccgagtcttttccgtcagaaaaaggttccggttctccgccatgtccgtgatgttttaaacatccaatatcgcactctttcggcgcagctttcagcacacgttcaataaacgttgttttaccgctgttttgaaaacctacgatctggacgatcgggaaagaattgaccacggccattcacttccattctcatcacggatgaggagcgcgtgaaccgtccggcccgcttcataccccctcgttcctcccggcagaaggataaacgcgtttgcttcggcaagagatgtgactgagcttgatttgtcgagaccgaccggtgacgccatcatttttccgtccttatgataaacaaatgccctcacaaatctcgtaaacggattcggcttcggaaagtcgtttgttaacacggcttccgcccatccggaatgaggtttttcattcagaagccatgtctgaatcatcggtttgacaaacagggtgaatccgacataacatgcggacggattgcctgaaaggccgaacagcagcatgtcatcggcccgggcgacagttgtcacgctccccgggcgcattgccactttgttaaaaagaacttccgctccgagcttattataaatgtccggaagaaaatcaaaatcgccgactgacacgccgccggtcgtgatcagaaaatcaacttttttcatagcttccttcaccgcagcatagctgtcatcaaaatcatcggaaattttccctaagttcagcggtactgcacccgcttcaatgacctgggcatacaccatggcagcgttgctgttgcggattttccccggctcaagcggatcgctgacatgaagaagctcggttcccgttgcgataatgccgacaaccggctttctgaccacgggaacggaagcatagccgaaggttgctaaaagagcggttacgcccggcgtgattttcgtccctttttttaatagcgagctgccttttttcgcatcttctccttgatatgaaatattatcgcccgcatgaaaagggcgtttcactgacatgtaattcgtgccgttttcagaaaacgtttttgtcagctcaagcatcactacagcatccgcgcctttgggaatctgcgcccccgtcataatgcggaccgcttcataaggcccgagttctttttctgacacggcgccggctccgatatggtcaatgacttcaaaggtgacggcattgtcacgggaagccgtttttgaatcgctcgccctgatggcaaacccgtcatacggagaacggttaaaagccggcacatcatgatccgccttaacatcctccgccaaatagcggtggagactgtcctcaagcgccacccattcggtatcccccttttttttataccggctcacccggcggactgcttcgtccacctgaatcggcgttcttttttcaagcatagcaatacatccccttcctacagtccgatcactctggccagaactgaattcgcttcttttatatcgtttgtaccgtgaatcagagcccgtccgtcctgaaaaataacgattctgaagcgctcgtacgccatgtgcagcaaaaattcatttgcttccactttaccgatctgcttcagacgtttgacaagctcttctttatccagcctctttaaggcttccgatctgatttgaacggtgtctcttccgcacagcacgcttgctttcggcctgttttcaggctgcagatacggatatacgggctccgcgccgcaggaagggcaatgatcccgtttgatctgatccacatttatgctcatattggtgttattccacacgtcaaacgtgaaaaagcgccgatttaccgccgcatgatttcctgtcagcaatttcagcgcctcagcctgctgataggcggagacgatatgaaccgccggaggtatgatgcctgctgtatcacatgtcgctccgcccacgggcatttgctcaaacaggcaggataaacacggcgtaacccccggaataatcgtcatgcacattccctgactgctgacacaggcaccgtaaatccaaggtgttttcgttttcagcgccagatcattgatgaccattctcgtttcaaaattatctgtcgcatccacaatgcaatccgcttgttcgatcagcggttcgagcgtttccgccgtaccttccgccgcgtaagcatcgatatgtatattactgtttaccgctaaaagacgcgccttggccgccattgctttcggcaggcgctgtctcgcgtcttcttctgtatacagctgctgtctttgtaaattgctccattccacataatcccggtcaataatcgccatacggcccgctccggctcttgcaaggccctctgccgcggctgttccgagggctccggctccgacaatcaggacactgctgtcagccagcgcctgctgccctttttcccctatcggcttaaatcttgtctgccgtgaatagcgctcttccatctgtgttgtccccttgcatttttatttccatcataccatgtttcttaccgatcagtcctgatttgaagactcgacatgcgccaaaagtctggtgtaatcgtcccgtgtgttgatattagcgaactcctccggcccggcgccgatgtcttcagcctgcacataacagacagacagccgtttcagcgtgtctgtcattttcagtttgttttgtgtcagctgatcaaaaagcacatcctgcacccgtttatggtaaaccgccaagaggggctgctctctgttttcacaaaccggtatgacagcgtccagatttcccgtcagcttcatttcaagcgcagccatcgtttttcttgtcacgagcggcgtgtcacaggatatgaccgtatatgtttcgccttccgtttgtttcattgccgtatatatgccggcaagcgggcccattccccgaaaccgcggctcatcggcaaaaacatgccgctccctgtttgataagaacttttttatatgctcagggcggctgataattaccgtttctccgccgccgaaggcttttttcgcctgttcataaaacatgccgcccttccactttgcaaaagctttcggttctccgaatcttcgggaagctccccccgctaatattacattcacccgtttcatgtcatcgctctcccattctatataaaagcatagcaaacgcctcagccgaaatacaatattacggtgcttgtctgtttaattaagaggaatagccgttgttcctttcccatattgtagtgttaacatcaagagggagatggttcttatgaaaatatcaggtccgtttttccacgacacttctcaagagaacctttacttgaaatccgaactttccagatgcagaaaaataatttcggaatttgaagcaagctacttccatcaaaaaaacaataagcttcaggaggaaaacgccaatattaaagagcggcttcacaagctttctgacgaattggaagccatggcgcaaaaacacaaacagactagtgacacggaacgttctttgcatgaaatcagggccgggctgctcgataaaatcgtcattctgcaagaactgcttcagcaggaaacgtttcggcggaaaaatgagatggaagaaaaacatcggctgcatcttacaaatgtaaaatttgaagaagaaaataaaaacttacatacccgcatccgctcacttgagaccgccgttcaaaccgaacggacttctcacgaagatatgaaacagcgttatcatgccgctgcagacgaaaatacccggctccaaacacaaatgatagaaaaagaataccagctcaaacatattaaaatagaaattaatcatatgagagatcgaatactagaaacaaaagaacggcttgtagaaatagaaaaaacgaaagaaaagttatttcaagaaaccattctttcatataaacggcagcttgacgaaagcgatgcttggattgccggccattttgctgatattgacagccgcacggcggaaccggcggaacaaactctggaaatcccttccgtttccaaagagactgttcaggcagaagacttgcttacagccgttaccgaacaagtcatctcccttcaaaaacaatttgtagaatcagagtcccgcgatcagtcgtttgatgaaaaactggatgcgttgaaagaacgagctgacggcgaaaagcctttccaaaaatatgttgtcaagcttgaaaaaaagcctggaaaagatgcgtcacttccgcagaataaacgggaaaacgcaaaaaaactgcttgagtaacgcaagcagtttttactgttttattcagcagccgtatcatttgccgtttctgctgtttcctgagaaatttctccctcaagaatatattggccgcgatatggttttttcacttccggatacattttaattaagctttgcataaatgttgtcatattaggaatttcaaggccgctttccttttcaatttccttttgcagttcggaacttttgatcgctgcattgtggcgtttcaatgttttaatcgctgcttcgcgcagttttgccgcttttgatcccggtctcgccgtccctcttcttcttcttgtagaaccgtctggaatgccggcgggaagagacgtaatagactgcatctgcggctgggaggattgcggctgtgtctgcggcttttgatagcttctcatttcctgtgctgcaagctctgcaagcaccgggagagagtcactttttttctccggacgaaactctttttttgtatcggacaggctgcccgtattgtctaattctctcagttttgcatatattttatcacgttctatttgatattcacgaatgacttttacctctgcttcgttcaattgttctaaacgtaagcgcagcgcttctctttcattaaacatgtgtaaaaccccctgtcaaaaatttaaacgcttttattaagatattagattacaaaagtaattttatcaactattattttatcattttactattttatttactctatgaaaaattgcttattttctgaaaatggtactttatatacaaaaatcccttatcatataggggattctggacaaagttccaatttattgaaccatttcaaaatataacttgaaattacttgtttaatgaaaattagcgtgatatctacaattttcgactataatatgtaaaagttaatgatatggataaaacaagcggtacagcgtgtttacggctgtttctcttattttttaagccatacatgccatattggaattttttatccaatagccacaaaaaaaccctgttacctaacggcaaagggtttgcagaaccgagacaatagtccggcggagattgtcccgattactcagaagcctgctccgtttctgaaagtacccggctgatgcgtttttcaagcattttcatcccgctctctcccgcttgaaaatggcggagctgtccgcttttatcaaaaacgtaataagccggcacatattcattttcaaatgcgtcagccagcgtatgatcgctgtcaacgtaaatcggctgagagatatcgtgttcagccgctgttttcttgattttctcaagatcaagatcgtcttcggaacggggcatgtggacggccaccacattcagctgatctttatatttatcacgaaacccgttcacctcaggcatcgcttctttacacatgcggcagctggcggaccagaagtgaatcagtgccggctttccgccgaccagctgttccttcgtaacttctctgttaatccatgctttagcgcctgttaattcaggcatttgctgatgtaatttcatcttatttccctccttatgaaaaaagttttttgccggggctttcagtccgcctggcaacgttctcctgttttccctccaaaggaaatgatttggctgaatcaccatgttaaaatgagtgtggcgattccttagttcatatcttcacaaaaatgaagatattgaaaccgggcaatatgaacaaatcataaatgtaataactggtttctatgaaaaggtttatcttatttaaaaaacgggtatatcacttttagctttttcctcaatagacttgaaaggaagacatcactatgattgatttaaaacactttgattgggccgggcttctcacatctgccgggattttcatcataaagctggctctcattattttagcgtattttattttccggacggcaggaaaaaagctgatcaagcatctgtttcagaaattcgagcaacaaaacaacctctccacaggccgcgcttatactttgcgaagcctcgcgcttaatgtgtatggatacatcctgattttcgtttttatcgtaatgattttggatttatttcactacaatccgagcgctctcattgccggcgccggcgtggtcggtctcgccgtcggcttcggggctcaggggcttgtcagtgacatcgtcaccggattttttatccttttggaaaaacagatcgacgtcggtgattatattacggttgccggctacagcggcattgtcgagcaggtcggtctccgtacgacgcaaatccgtagctttgacggcacgcttcactatctccccaaccggggcattacgaatgtgagcaaccattcccgcggaacgatgcaggcgcttgtcgatattaaagtgccgcttgaaaaaaatcttgatgaaaccattcaaatcctgcaaaccgcgtgtgacaaagcagccgctgagctcccgcagattaaggaagggccggacgtcatcggggttcaggatttaagcacgtcagaaatggtgatcagaatcattgccaaaacagaaaatatggagcaatggcgggttgaacgcgtactgcggagagaaatgaaaatcgcgctcgaccgttttaaaaacgccgcttccgccgaatagaaaaaccgaagcgtaagcttcggttttttctttttaatgaaattttttttccacttcgctgcagatttcgtcggcggtcattccggaagccgtaatgacgggagcctgagttgacgtatcggcaatgccttggacattgctgtcaagtccggttacgacacagcagtcacaattcttcgcatcctcaggagtcttcatcatcactacgtcatatcctttttgttttaacgcctgttctacatccgataaagattgttcaattccaatttttttcgtcatattgaacacctccgttatgtagaatgctcaatttttgttagattattcttcttttcggatttaattggcatacttcgaaaaatatccgaccatgacatttaccgcggtttccatcgcatcttcatccgggttcagcttggcgtgatgaagcccgtgggatgaatcggcccccagccagaacataaagccgggatattttttcagcatatatccgaaatcttctccggtcatcgcttctttcgccgttttcacgtcagcaagctgatgatcgctgacaaattgcataaattcttcggtcaggccgcttgtattataaacttgatgataaacggacggatacgtgacttttcctttgcatcggaagccgatttcaattcctttgacaagctcttcaatccgctttttcaccatacgcattgattcctcggaaagcgtccggatggttccctccagatgagcatgctctgcgatgatattttgcgccgtgcccccggtaatcgttccgacagttatcacagcgctgtcaagcggatccgtatttctggatatgaccgtttgcagctgcgtgacaagcgtgctcgcggcaacgaccatgtcatctgctgtatgcggatatgccgcatgtccgcctttcccctcaagatcgatgacgagctcgctcgtattggcaaacagcaatccgcttttggtggaaatggtgccgaccggcagctctggtgctatatgtagggcggtgattaaatccggcgtccattttttcagcacatcgctttcaagcatcggtgccgctccgcccggtccttcttcagccggctggaataaaaagagcagatcatgtttgacggggtgatggacaaaatgatcaataatgccgagcgcgatggtcatgtgcatatcgtgtccgcatgcgtgcataaaaccggggtgctcagatgcaaacggaagccccgtctgctcttcaatcgacagagcgtctatatccgctctgtaggcgagcattttttccggagccgtgcccttgattttgacaaagatgccggttctccaagtttcgatttcaattctttcttccggatattggtttaaaagattcagcaggtactgctgggttttatattcctgaaagccgatctccggaatgcggtgcagatctcttcggatggcaatgagccgctctttttccatatgtattcctccttgagataagaataaggcgtggattttatcatccacgcccattctatcaaaccattccttacagctggcgtaattcctgtttgatttctgttttgccttttgttttttcatcgatatctttgatttttttcgctggtgttcccgctacaacggtatatggctcgacgtcatttacaacaatggctccggcggcgacaaccgcgcctttaccgattgttacgccttcaagcacaaccgcatttgcgccgatcacaacgtcgtcttctacgacaacaggcttagcgctaggcggctcaataacgcccgctaatacagaacccgctccgatgtggcagtttttgccgacagtggcgcgtcctccgagaacaacgttcatatcaatcatcgtaccttcgccgatgactgaaccgatattaatagatgcacccatcatgataacggcattgtcgccgatctcgacttggtcgcggataatagcgcctggctcgattctcgctttcacatcttttaaatcaagcatcgggatcgcagagttgcggcggtcattctcaatgacgtaatcctcaattttgtctttgttttcttcgattgcgcttttaatttcagcccactcgccaaaaacgacgccggattggccattcaggaatgttttagcggaatcgccaaagctgattccttcgagatcgccttttacatacacttttacaggcgttgattttgtactattttgaataaatgaaataatttcatttgcatccatcattttcatatgtattgtcctcctctgattttctacctcattactgtaacaaaggaaggatacaaagacaagaaaaaaaggaacaagcctttattctgccggctggctgcacagcgcggcaaactgtcttccgaattcccggagctcttcttcctcactgccctcagggttgttttcaattttgaccggcggcagcaccacccgtccgccgcgggccgtgattactttttccaattcgtcaaccgctccgcaaaaaaactcataggacgtatctccggaaccgaacaaagcaaatgtttttcccgtaaactccagtttttccatatcttcagcaatatcgagcatttcatcaggaagatccccgtctccccacgtatatgtgcctaataaaatatactcgtaatcattaaaaagtccggcatgaatatccatcgcttcatatctgtctacggatgcttgtgcttcgatcagccctttttcaattaaatccgccatcgcctcggtgtttcctgacattgtagcgtaaacaagcaatacattccccatcttcgtctctcctttatgcataaaaactaatgtgcgagccgaaccgcctcatacggtctgacaaacttactttcgtaaaggcccgcgcaaaaaaaatcttcttcccggttggccacccgccatccgtgaccgcggatcgtatcaaaccactttaattcaccggcagcgagatcagcttgataaatacgcgaaaatccgctttcgtcctgtgacgaagtgacataaataatcccgttatcctcagacacgtcaagaaatgatttttcccgtacattgtccccggctgtaatggcaaactcctcatgcgtccgcacgtttcggacagcaagctccccccgttctccctttgccgcgccctttgctgcaatgagccagtcattctgatacatcatcattgaagccgtcatgcgctgcctttcgcggcttatacgccggatgcggccttccgtcgtcagatcatacgcccaaatgccgccatgattcatatgaatccgggtgccgatataaaccgtctgaccgtgtaaacaaagcgaacggatgacaggcggctcctttaattgtgaaaaaggcttagccacatgccaagtgacgccgaaatcatcagataagtagatgcagtatgtgccgtgcgcacagacaaatccgtcattccgcccggcaacggcccatacggaggcgctggtcggaaatcgggaggccgtccaagtctttccttgatcggccgatctgaggacggcgcctttttctccagccgcgaatatgtagggccctatataagtcagcacatgaatcctgctcttcactcggaatagtcttttccagccttcttccgccgaaaaatgaaaaataccttcgcctttcacagcgacaaaaaatcctgaagatactgatgccatgacagccgtcgcgcctttatgaaacatggcaccggtctccgtggtgagcggcccatgcaagaaaaccgcggacaaattctttgcagcattcttgatcttcagccgtctcgggcgccagctcaattttcagcgtttccggatataaattggctccggcctgttcaaacgcatcgcaaaacagcgtgaccgcttcgcaaaacttcgggtaggcgtgatcgcctgaaccgaaacaggccgttttcagtccgttgagctggctgtgcagaatatcttcgtaaaaatcttccgcttcgtaaggaagatcaccatccccccatgtgtatgtgccgacaaaaacataatcatatgctttgagagaatccgcatctgcttcgtccatatcaagacagtcaaccgctatctgatgcccgctcagtgtttcttttataatgccggcaatatcctctgtattccccgacatgcttgcgtatatcattaatgctttctgcatatgatcacctcgtaattgataatgattttcattaacatacataacactttaaatgataatgattttcattgtcaataaaaaataaaaaaaagacagcatgattgctgtctttctaaaatgggcgttcctgtttcagcatatctttaatgacagaaacaaaagcctgcacctgttttaattcaaatgccggctcataaccgagcagccatgtgtcacggccgatcggatggtcctttgtatcaagcaggggcattttatttactttatcttcctcttctaaggtgactgacggcagaatggcataaccgatcccgtgcagcgccatttgcttgcacgtttcaatctgatcgacaaggatggtctgtttcggcgaggttttgaatttttgatgccaccaatgctgaatttcctgaaaatatgtactgtcacttttgaattgaataaacggccggtcggtatgggcaatatcatcaatacaggaaatttccgtatcgaccaaatataaatgatcggtcattaaataatctttccggcctttccattccggatttccccggataatgccgatatgtacctgatcttcatacagacttttcagcatttcgctgctccagcctgtaatgagagagacctttgcattcggatatcgttccacatatgtttttaacactttcggaagccagtgctgcccgataatggaggcgacggcaagctttaatgtgccgtgaatctcaccctcaagttcatcaatgttttctctgattctttcttgccgatccgtgacgtcatttgcaaattgtatgattttttctcctgccggcgttaccgtaagtcctttttgagacctaagaaagatctttgttccccaggttttttcaatggtctgcaatcgctgggacagagccggctgtgacacgaataaccgttcggcagccttcctcatgtttaattcctcagctaaaactacgagcatatgaagctcttgaagctgcatgtcgtcctccttttcaatgccttttcgtattccttatctaccattctaatcaaataaaggctgccgaggcaagcgccactcgtatgtatgcgttttctttttctggcatgcgaaagaacaaataggctgatcgtgcgagcctacttattcaatgatctgatatgactgctcaactgctttaatacgactcttctcgtgaaaatgccttcaaagacgccttcatcattttcaacgcagacaaagccgttgttaatgaccatgctgaaccctttgataatcggatcattgatgtggagacggggaatgtctttcagcatgacttcctcaaccgtaatttgatccagcttctcaaactcgatccgttcaagtccgaaaatgctgttcataatcatatttgtcccgatcaaaccgtgcagacggtacgaagcgtcaaggacgggaatggcggtatagccggttttcgtcagcactaatagagcatgctcaaggttgtttccgacttgaacgtgcgccactttatccgcctcgatcataaattgtccgactgttgcatcaagaagctgatctgattgtaagctaatcatgtcacttcgacccctttacatttttcatcaaagcatgtattccctatattgcaataatataaacattatcattttttgtcgaaaagtttccgtcaataaaaaagatactctttgcaatcgagtatcaatttataggccgctgattaattttcgttccgaaaacggtcatagagcgttacgagttttttataagtggtcccatcaacgctttttgaccctgcttctatatcgttgatttcgctggtcaaaagctcaatggcatattcttgattgatcaggatattcagcagaagtttctgttcttcttccgtaaatcgttcactgataagactcatacgtaatcaggccccctatttttaactgaatacctctgaaagcaatgtgaaatttgctttcagctctaccgctagaataagtaaacagaaaaaaatcgtcaaccgcataattcgacattttgcggattctgtatgaaatattattttgtgtaacgattggcataactgaatgctgtgcaggaatcgggcttgattttcgcttcaatacccatcgaggtaatgcggccggtcatttcttgtatcaattcttttgtcagccctttttgaccgatatccagatgcacttcaaatgaaagatccgccccttcatccgcaaaaggcaagagcaaatctgtcagttccataagacagccgtcgaggatatgcgcagccatctcctggctgaacgcggtttccagcgagattttttcgcgaaggctatgtatcggtcttgcaaggtcgtgatttttcaaacagccccaagctcccttgcctgtacggtgcaagtgtatagccgtaataaactttgtgaagtcgcggtaaacttgtgaatcagtccctacagacagcacgtatgctgaacgggggtctttattgacaaagcgtttcagccgctccgtcacgtcttgaaaggtcatctgtgcctcagaaagattataaaacagaaaagaatcagccatgtacggacactcctctttccagagtctacaaccaaacgaacaagcacgttcctttgcataatttaataaagctccgcttgcggaagaccggaagcttggtcagcctgaaaaatcaaatcacattactgaaggagctcaaaaatttcaatagaaatcatgtcaatgttatcaaacggatatgtgttaggtttttcacctttttggaaaaccgtcagttcaaacgtttgatttttttcgaaatatttaacactgcaaattttttcgccgttaacttcaaaataacgctgcatcggctcgttagccgcttccgctgtttcttgcagactttgcagccgcgtgatgatacccattaattgtgacattctaaaaaaagactcctttcaaaaaacaacttcaaatcaacaagtatttattataatacaagtcctacagagcatcataccataaagtagaccgggatggcattttcccgctggattttcaaaaagaaataaacgggaaaaccgtgttttcgaatagtttgaagcttttttcggaatgtcatacacctttcaaaaataatttttcgctttttgagccgccattgtcagatgtatgtaaggagaagcccttttatgcgcagacagcataaaaaaacttggcgggggtagcgccaagctttttcggatcttgatctgatagaggggttggggaacagagagtaacttctctctataactaaatgataatgattatcactatcattgtcaatcgttttttaaaactttttcacatttataaaaaaaagcggcatactgcagccgctttaaagtaacccgtcctgttcatataaataagagtaaggcagatcgataaataaatacatattgtcatccatcgggtatgaaaaggttctgatcatctcacccgtctcaatatcactgtacaggtcactgaaaaagccttttcttgaattccgcatcttcataatgttttctaaaaagtacggacgccagctccagtttttctccacgtattcaggctgataaagccattcgccggactgcttgaacacatttcccgtcagctgatagccttcttcatcacacatataaattctgaaacagcagtcggtcaggttttccgccagttttttaataaactcatcgtccgcctgatgggttttcttcagttcggaaactgcctgattgacccgcttataaaaattctcagagtgttcgtatactgtctccagcttctttttttctctcgtgataaattgctgaaactccgttttcaagcgtgcttttaacaggctccggtctataaaatcgccgctcggcgcctgcagataataaccttgaaaaaatcggcctccgtttctccatgcgtactggagctgaaaatcagcttctatatcttcatacagcagcgcggcgccgatttttctcgccagcaatgaaatgctgtacagcacatgctcatacgaaggtgacggctgagatactttcagcgcctgcaaatctattttcagaaggtccggtgaaaggagcgcgattctgtccaggttgctgctctccttacctatattgtccaccgcgattttaatgccgtatgtacgatagtaggcaagcatatggtacagctgttcaatgtcgccttcgaaattgtgctcggtgatctcaagcacaatacggttcaattcaatgccctgctcttcgtattctttcaaaagctcaagaaagctctcgccgtggtcaagcatcaatacattcgcatcctgattgataaaaatcaacagatcgcgatcagcttctttaaaccgctccagcgcctgcctgatgactctgtcatcgacctcaagcttatattcttccgggatgccggaatctaagaaaaacggcccgaggctctcaatctccgcatctgccaaaatacggccaagcacttcgtagcctacgactctttgttcctcagcgttaaaaatcgcttggtaatacggaataacatcatcaatattcgtcagtatatcaagtgggtccaacatgttatcacctgcttctctatctttgtctgattatacacaattatatcagcaccacaaatgtttagattaggggaaaaaggaggcagtatggcagcagtttaaaataaaaggggaaaactttttaagatcactcttcagaccggttaattaaggacgttattcatttgtttcaccatcacaaataaaaggataaatataagagcatgataaccggcggctgtccaaaaataatggctccaatcagtactgttaaatatccaatcatcatcatgtttcaactgaaagaaagttccttttttatctaaagtgccaaatgtaagagttgttaacccgccagcactcttggaaacgtcaacttcatacattgaaccggcatgatcagtatgatttattggcatatacgtataatcagataaaattgtttccgccagcttggttggcagagacacatatcatacagccgatgtatcgcctccgagcccactcaaatactccctggctttaataaatttcgtttcatcaggaaaatctatatgatatagcttttcaaatctgattatttcatcagatgtaagattggtattttgataatactccggagtaaaagcgcaaatgataaagtaccaaatattaaagatgataacgaaactgcttacaaatagtacaacgaaccattttaataatttcttcacttattcacctcttaatctttaaaaattatatcataattttgaatagaaaaataaaacaagcgaacggtcacctttaacgttcgcttgttttgcaaaatatgtcatgtaaattaaaacgggtaaggattcagccattgccccccgtccattgtgatacaatccccgtttatataggatgcttcatcggatagcaaaaacgctgccaaagcggcgatttcctccggtgtccccagacggccgagcggcacactgttcatagtgcgggacaccgctttttccgattcaaacagcttctccgcaccgcctgtccgttcaatcgggccgggggctatcgcgtttgtgcggatgccgtatttgctcccccattcaacggccagcgttcttgtcagtgacaatacccccgctttggctgcagcggaatgaacgacacccgctcccgctccccatgcgtatgtagcggccatatttaagatgacgcccttctgctcctgctcgatccaatgccttgccgcggcttggctgcagaaaaatgtgccgtttaaaacaatctcaataacagctttccatccattgggcgtcagcttctctgccgggcaaataaaattgccggccgcattgttaatcagcgcatcgagccggccaaagacttttttcgcttctgtaatcatgtctgaagcggcggaatcagaacggacatccatttgaaaacaggcgacctgcccctcaaaggtctcaatttctttttttgtttcctcaagtgcttcatggttcctccctgtcaccatgacgtgccatcctaattcagcctgttttttcgccattgcttttcccatgccgcttgaaccgcctgtaatgattaccgctttcttatccataacaaacccaccccttttattgaatgaataatcattcataattttatcatagatgtctttccgcgtcattacatgctgagaagggatttttcagccaggctgatgatataatagaacaactctgacaaaggttggttttacatatggagaaaatgacgagaagaacatttttaaaaagaggattcggcattttgggtgcaactctcgcaacggcttgcggaggttacggctatgcccggtatattgaaccgcgcatgattgagatcacccgtcatacaatcaccagccgcctgatcccccgcggctttgacaattttaaaatcgttcaattcagcgatacgcatctcagtgatgtgtttacatccggtgacttgaataaagcagcggaaaagatcaatcagctgaaacccgatctgctcatctttacgggagatttaattgataagccgcatttatttaatgatcaccagcaagcactggccgtgctgcaaaatctggaagctcccttcggcaaactttgtgtttacggaaaccatgaccacggaggctacggtacgaacacgtacaaggctctgatggaagcggctgattttcaagtgcttcgaaatggctgccgtcaggtgcagctgacagacggaagccggattgaactcgcgtttttggatgatgtaatgctcggaaaacccgattatgaaggcaccctttcccgcctttccgaagatgcgttttccattttaatcgtccacgagcctgatgccgctctcaagatcggcggatatcccgtaaacctccagctgtcgggacacactcacggcggccaggtccagctcccgtttttcggccctctcattacgcctccatacggaaaaacgtataccgacggcatgtatacgctgcatgacacagccgtttacgtcaatcgcgggctcggtacgacaagactgccgtatcgatttttagccagaccggaaatcacgctgttcacattgaaaaccgtacaaaaataagacttttatcccgatgcacagacatcccctccgtaatatgtatatggaaaagagcaaaaaggagggtgacgaaactgctgacatatcaagtgaaacaaggagaaaccatctcaagcattgcgcaagacttcagaataagcactgctgctctccttcaggcaaatccctcaatccaatcggtcatatacgcgggacagcacattatcataccgaatcttcccgacccatccaccattccctattccattgtcgtgtatatcggagcgaagaaactggagttataccgcctcggcaggctcatccgtacgtaccccatcgcagtcggaaaaatattgacgaccacgccgaccggagaattttacattgtgaaccgccagcccaagcccggcggcccgttcggcgcttattggctcagcctctctaaaattcattacggcattcacggaacaaataacccttcctccatcggcaaagcggtatcaaaaggatgcatccggatgtataatcaggacgtcactgaacttgccgctaccgttcctaatggaacaagggtgaccattataagatagaaagatcttatttgttaatggaacgagctgatgataatatattacagtgggacctttagggtaaggagcgtgtttatggatatatttaaaaatcgcaattttgtccgtctctttttcgcagcactcgcttctcaaatgggaacgactgtaggtaatatggctttcgctttttacttgctggaccatttttcaaaccagccggcatacacaactttggctgagctgatgtattcactgccgacagttttcgtatttctgattgtcggtgtcgcagctgaccggcttgacaggaaaaaggtcgcagagaattgtgattggatcagagccggactgacgatcgtattatttgccgcattatacaccgggagcatccctctcgtgttctgtattttgttcatcagaagcgccgtgaccaagttctttttcccggcggaagccagccttgtacaagctattctgcctaaggagcattatgcgaaagcggcgggacttaaccagatcctgttcagcatctttatggtattcggcgtcggtatgggcgcgtttatgtataaaacgatcggtattcacggagccattatccttgattttgtcagctttattgtatcaggctttctgatccgcgcctgccgcattccgaaagaagcccgtcagccgaacggcccttttaaatggggagattcgtttctgaaagactcggtcgctgattttaaggaagggatcgtatatattgttaaaaacaaattgcttgcttcccttattttcggcttttttatctttggttttgtcaacggcggctttgccgtactgccgatgtttacgatgaaatacggacttgcgcctgatcattacgaatcacatacttccatcttcaccgtcgcactcggcttcggcctgcttgcaggaagtgtgatcggaacaatgatcgcaaaaaaagtcaaaccgcatcatttgatgtcgattcctattttggcagccggactgctcatttttgtcctcggctatacggataagctgtggatttattatgcggcggctttcatcctcggcatgtgcatcggccctgtcaatatcgccatcggcggctggatgccgaaaatcgttcatccgaaaataatgggccgggtcagcggctggcaggatccttttatgatgtttgcccaatcgattacactcggactggttgccctgttatttccgaaattcgtttccaatattgattacctttattacggcatgggaatcgtgattttagcggtatttgtgttctattttatcgctcttccgaaatacagcgccgaggcagcagaggtcgatgtgcagcaatcattaaaggctgattccgaaaaacatgcgaaacctgtctaataaaggaaaaaaatgcgcccttttcatcagaaaaaggcgtatttttataatcaatatttgcatttcaacgctaaaaaagtataatctatatatgaacttgatcaatgcaaaggagagaaataatggacgaccacgcttattcgaaagagctgcagccaaccatcgagaatctttcaaaagctgtttatactgtgaaccgccatgcaaaaaccgcccccaaccctaaatacctttatctgctgaaaaaacgggcattacaaaagcttgtgaaagaaggcaaagggaaaaaaatagggcttcacttttcaaataatcccaggtttagccaacagcagtcagacgtacttatctctatcggagactactattttcacatgcctccaacaaaagaagacttccagcatcttccgcatttaggtacgttaaatcaatcgtaccgcaatcctaaagcacaaatgtctttgacaaaagcgaaaaacgtattgcaaaaatatgtgggcttaaaggaaaaaccgcttgccgccaacaggcagcagcccgcttatcataaacccgtatttaaaaaacttggtgagagttatttttaattccgccgcaaaaaagccgatgcgtcatgcatcggcttttttctattcaatcacgtacgtatccacttttttaatgagctcgctgatttcaggcttgctgatctgttcatccgctccgactacttcgccccggtggcgcaggtcgtccgtaatgagggacgagaaaatcataatcggcacatcagagctttgcgggttatccttaaggagcttcgtcaaacgatgcccgtccattttcggcatctcaatgtcactgataatcatgtcaatatgatctgacaggtttgctccgttatccgtcagttccacgacgtaatcatacgcttcttttccgttttcaaatgtaacgatttcactgtaccccgcctcagtcagctcatccgtcaaaagacgcatcagaagcggcgaatcttcaacgatgatcagttttttacccgcccgtctttcatcaaatccttcctgatggacatgataagtctcaactccggatgccgattcaatatcgtaaatgatcttttcataatcaggcagaaagatcatcgtgtcttccagtttgatgattcccgttaaatgccgctccatgccctggttcagggaagtcggcttttcaatcgcctcccaggacaccctgtggatttgtgaaacggaaccgacgtgaaagacgattttccgcttgttgaattccgttacgatatatttatcgtcttttgctccttcggcatcaacgccgaaaaaggaatacagactgatgacgggaagaatttcgcctctcagcttaatcatcccttctacgtctttatgagactgaggcacagatgtgacatctaccggctgaatgatttcccggactttcatcacatttatgccaaatgtattgacgcctacttcaaatttgacgatttctaattcgtttgtgcctgaatccaataaaatatcgtattgttgtaaagacaattcaatccctcgctatccgcattcagtattgtactgtatatatcggctgtaaacggaaaaagtgaatgtattcgggccaactggccatgaactctttataaaaagatgcttttttctgatatcccattgactttttgacatcgagtggtaaaatagtcaaggatttttcaggaagaagggtgtaataaatgggtacagtagtcatattcgaccaagatcaaatgacggtgttagaagatatcagcaaaacggcttacctgcaaatgaaaaaagaggcgaaagagcgtcccgacaagcccgctccatacatcttatggcgggaagacgtcagctttgaatacgggtattaatgacattcgccacatatcacaatagatagatcatgatacaatgaagacaatcatttcagctggttgtcttatttttttctgaaaaaaggtatgttttcacatatcggacatatactcgggatagttcaataaaaagatgacaaatgctcagctagtggtaaaataggataaactcaatatatagtataaggtgatgaattatggaacatttgcttaatccgaatgtaaaagaaattgaaatttcaggaattcgcaaattctcaaatcttgtagctcagcacgataatgtcatttcgcttacgatcggccagccggatttcttcacgccgcaccatgtcaaagcggctgccaaaaaggcaatcgacgagaacgcaacggcatatactccgaacgcgggcggccttgagctgagacaggccgtacagctttatatgaagaaaaaagctgatttgaattatgaggctgaaactgaaatcattgtcacaaccggagcgagccaagcgattgacgcgtctttgcggacgattttatctccaggcgatgaagttattctccccggaccgatatatccgggctacgaaccgatcatccgcatgtcgggcgccgttccggttcatgtggatacgacgacacacggatttaagctgacggcgcggcttattgaagaatcgctgacaccaaaaacaaaatgcgtcattcttccttatccgtcaaatccgaccggtgtgacattgtctgaggaagagctgcaaaacatcgcagccgtcctgaagggcagaaatgtttttgtcctgtctgatgagatttacagcgaattaacctatgacagaccgcattattcgatcgcgtcttatttgagagaccagacgatcgtcatcaacggcctgtcaaaatcacacagcatgacgggctggagaatcggtttcattttcgcaccgaaagaaattgccaagcacatcttaaaagttcaccaatacagtgtgacatgcgcgtcttcaatctctcagaaagcggctcttgaagcggtgacaaacggtgttgatgatgcgcttattatgagagaacagtataaaaagcggcttgactatgtatatgaccgtcttgtttcaatggggcttgacgtcgtaaagccgtcaggcgcattttatatcttcccttccattaagtcattcggaatgtcatcgtttgattttagtatggctcttttagaggatgcaggtgtggctcttgtgcccggcagctcgttttcaaagttgggtgaagggtatgtgaggctgtcattcgcatattcactggatacattgagagaaggcttggaccggctggaagcatttattttaaaaacgagagaatccatgcagactatttaaacaacggcataacgccgttgttttttttattgtttcgggaatgtaatgtgaaaggccgtgcctctgtccggtttgctgtctacttggatggctccctggtggtttttaataaggttgaatgtgaccatcagccccaggccggttcctttttctttcgttgtcaaaaacggttcgcctattcgtttcagcacgttttccggtatcccgtcgccctcgtctttcaccgtcacattaacggaatactcatcttctgtcatgatgatgtgaaccgttcccccatccggcatcgactcaacggcatttttaatcagattgataaacacctgtttcagctgattttgatcaccgttaatatacatgctgtcatgttcgtaatccgttttgataaaaatccctttaagattcgcctgcgtctctaaaagagcggtcacttcacttataattttctttaagtttacacgctctttcacggcgttttgctgaggtttggcaagcattaaaagctcacttaaaattaattcgattctgctcagttcggaaaacacaatttcaaagtaatgttcgttttcctccatcgtcggcttcatgagctgtaaaaatcctttgatcgccgtcagcggattgcggatttcgtgagcgatccccgccgccagctgccctgcgatagacagcttttccgacttcagcattaattcctccgtctgcttccgctcagaaatgtcacgcagaatgacctgcacggccgtttctccgaaaaacgtcgtcggaatgcagaccatttccgtgtagatcagccggtttttaaaggtaaaccacgattgcttaatgatttctgactcggtctttcggttgataatattttggatccgctgtttcacgccgtcatgatcacagggatgaagctgatcatagacgtttttcccgattaaatcttcatatgtttcagcctcaaacagcgaaatgcccgattcattcatgaatacccacttatcattgtgaatcacggcgatcgtgtcaattgaattctgaatgaggagctgataacgctctctgcttttttgcagaatcgtttggaattttttccgtgaagaaatatcaatcagaagcagcaattccgcccgctgatttttatatgtcgtcggtgccgccttcacttctaaatgaacgggcgtgccgtcgagccttctccacgtctgttcgatcattccgacttccattcctttttgcatccgcacaattcggtttttcacaatgtcgtgatactcttcttcaataaactcataggagcgcctgccgattacctcgtctttgctttcggctcccagcatggcaagcatcgcgttgttggcgtaggcgattgtgccgttgatgctgacatataaaggattcggcagcatttcaacaagacgctcgaattcgccgtttccagccgcatcttccgactgttgttctgccttttgcttcttttgttcatacatataaggccggcggggcgtcttctcctcaagcaccttgattttgaggatgatttcccgatccgtcccctccatttgcggtgtgacaatttccacacccgcttcaagccatacgatggtatgatcttttttaataagacgaaaggtgcaaggcatcaaatgatgctcattatagaagtaactttcaaccaaaaattgatcttcttcatgcaggaacgttttgagaaatgacccgatcatctcttcctgagaataactgaagtacgatttacagtttgcggaaatatacataatacgcccgttagacgtcaaaacggcatgaagatcggttttcgattgaaactgtttgacatgctgagtatcctgttccacagaatccctcctttgcattatactcgcactgcaggctggacacggactgatataaaaagaaattccactagattgattcgctaaaaaatgagcattctccttctattcttattgtgaacgtcaattttcctgaatgaaagaaagggcgcacgagatgttcggccgccctttcatttgttattttttattgtatttcttttcaagttctttgtaagcgtcaattgctcccttagcaatgtttttgcttacatgatctttatcatttccaacagacggaacgacgacgctgaatgccactcttggatgctctgacggataatagccgacaaaggtcaggttatacgtgtacttcccccaccagtttttgttcgtgccgtaatagtgcgtctccgcggttcccgtttttccggaaacatcagcgccggaaccttggaatgttgaataagccgttccttgaggtgagcttgtgaccaatttcattcctttatgaacttggtcaaaatcgctcggactgttatttactttgttcaaaattttaatatcccgctgttcaatcgcttttccaatcttatttttgctgtccggttcatgaatgcttgtgacgatccgcggctggacgcgatacccgccgtttgcgatggctgaaatatattgagccatttgaagcggcgtatacgtatcaaactgtccgatcgcaaagtcaagcagcaatcccccgaccatttgcggatttgactgcatgcccgctgattcctgcggaagatcaatcccggtcttcacacccaaaccgaattgggcgtagtagttgcgcatttttttaatatcgtctaatccggcaggcagcgtgccgtacggcctgtaggtaatgccggcgatatgcatggccacatgaaacatatacacgtttgaacttctttgcagcgcggtcagctcagtaatggctcccatttgtgtccacgattgttttctcgttttgcctttaaatacaagcggtgcatcgacaaacgttttataatgcgggaggccgctttggtaacccgcgagaacagtcgctcctttaacagaagagcccatctcatattgggtcgtaaatgctccgatcgcaaaatcctgtgttttatttgtttcgagatcgatgcgtttccccgccattgagagaatatccccgttgttcgggtccatcatgacggcaaatcctctgtcaaccatatagttgcctgcggcgcggcttcttctcagctctttttcaatgactttttcgactttcgactgtaattccatatcgagcgagagttgcagatcgtagcctctgctgccttcatcgacgggcttttggctgacgacctcacctttgctgttttccacatactctactttttctttatgcgcgtttaaatagtcctcatactgatattcgatgtagctttttcccacccggtcattcagtgagtagcctcttgtgacatagtaatctttccgttcgcccaacaatccctgttccggtgtcgtcacaccgccgaacagagagtacagcgttttgtcgtatggatattttcgcgtccagtcattgatcacgtcaatgccggggagctctttcaggtgctcggatacgacggaaacttcttcatatgtcagatcgctttttggtttttgcttgttgttttcatgctcgtcaagcaatgaaccgctgtttccgtttccgttcagcttattcgggtccattgatttgacgacttgcggctgataggcgttgccgcttgaaaaacgcgtataaatcgccgcaatttgcagctcttttttatcttgtttgatcgcatcaatctcctgcttcggaacgcgttcaatctggcgtttgtacacttcttgggatttcaggctgttttctgaatccttcataagcttttccgccttcttcggatgtgccgcaagccagtaatcaatgatatttcgatccttcataaattcagtatcaatatgaatcagtgcggcgagattttttgccgttttcaatttgtcctttgccgaggtttttgaggtagaaacgtatacaatttcaggcacagcctggttatcaaccgccaccctgttccgcttgtcatacatttttccccgcggtgtcggataataggcggtttttgcatttgccttctccgcatcctggcggtgtttatccccttcgacaatctggacgatgccgagtttaaaaatcagtgccgtaaagagaagaaacacaatcaaaaaatagagattcattctcagcgctctgtaacgtttcgtttttttctttggttcgcgcgcgacttcagccactttctgttacacctctcaaatcattgaatatatttacataaacagattttaattgtaacatttttgtaaaagttgttacagcgaaaacgggtaaaaaaaactgtcaagatcaaattatcttaaaatatatctaacacttcaaataatttgaagagatgtaacggattttaaaaaataaatacagatcgtttttactgatataaagccatttttctgtgctcaattacaattatgacaaacgtttgttgtcaaaggaaatggctgcctgcattatgacaaaaaagctgtgataagatttttcatgtagaaaaaaacaacttctctgggaggctataaacttatgaaaaaagcatttctcttatctgccgccgcggcagtcagtttgattacattcggaggcattcagcaggcatctgcaaaagagctgtcatgccagcacgtcgttactgtgaaaaaaggaaacaccgtacagcatctgactcttcaagaggctgttgaaaaactacatatgaaaacgagcgtgaaaaagctgaacgttaaaaatgagaaagaactgactcagctgctgcaaaaacacgcaaagcattctgatatgacagttaaagacgttcaaaaagaaacaccggaaaaaacggccccgacagctgccgaaaaaccgaaagccgatcaaaaccagacggctgacaatgcaaagcagacagataatacaaacaacagcagcgagaaaactccttcatcagtcagtgcgtatgaaaagaaagtcgttgaattgacaaatgcagagagacaaaagcaaggcttaaaacctctgcagattgatgaaaaattaagcaaatcagctcacgcaaaatcacaagatatgaaagacaaaaactatttcgatcaccaaagtccgacttacggctcacctttcgatatgatgaagtctttcggaatcacttataaaactgccggtgaaaatatcgccaaagggcagacgactcctgaagccgtcgttaaagcttggatgaacagtgaaggccacagaaagaacatcatgaatcctgagttcactcaaatcggtgtgggttatgtagaatcaggaaacatctggacacagcaattcatcggaaaataaataaaaaaagattgcccggcgggcaatcttttttttatttcacccaaagcttataaatgctttgagttccgctgttttcttcaccttgcgcggaaagcttgtcgtacaatgatttggccagcgccaatccgggcatttcttctcccatgagctccgcttcttcaagggcaatgcccatgtctttaataaagtgtttcacgtaaaatccgggcgcaaaatcgcctttcagcatacggggagcgaggtttgacaatgaccagctgccagccgctccggttgtaatgcttttcagcacttgttccgggttcagaccggatttttccgcgtaagccatcgcttcagccactccgaccatccccgctgcaatcgcgatctgattgcacattttcgtatgctggccgctgccagccggcccttgatactgaatattttcccccataacggagaaaagcggcaggcatgcttcaaacgcttctttttctcctccggccataatggcaagcgttccgttcctcgcgccgatgtctccgccggaaacgggtgcatccagggcgtgaatggacttttctttggctttctccgctattttcttcgccagagatggttttgatgtcgtcatatcaatgacaaacgccccttcttttgcatgacggagaatgccgctttcaccgagatagatttcctcgacatcactcggatagccgaccatggtaataatgatgtctgctttttccgaaaggtctttgaccgtctcctgccagaccgctcccttattcagaacctcttccgctttgtgtttcgtacgcgtgtagactaaaacaggatagcccgcttctaaaatgtgcgatgccatactgtttcccatgacgcccaaaccgataaatcctaccgttttgttcactgcgctttcctcccctgatgcgattcatatatcactctttcatgtctatattaccatattataggctgatagagaccgcgtcacaaggtgaatttagaaatggcgctgatcagatcttcgcttgcgctctttaacatatcagtcgattgcttcactttttcaagcgtaacgagctgttcatcagtagaagcattcacttcttccgccgctgccgcagattcttgagaaatggcggagatgctttgaatcgcttcttgaatcgaggcttgttcttcactcattttttgaatgtcattgtaaatatgatctataccttgaacgagagactgcatttccgttgtaatcagattgagaacctcacccgtttcatgaatggcgctgttttgttcatcattcattctgcttgcctcaatcatcgcgtgtgacgcttcttttgtctcagattgaatcagacggaccgtctcactgatatggccggaagaaagagctgattgttcagcaagcttgcggacttcttccgcgacgacggcaaagccccgtccgctttctcccgctcttgcggcttctatgctcgcattcagcgccaagagattcgtctggtctgaaatagcggatattgccgtcacgacttcttctatgtttttcgtttgttcttccaggtcattcagcattgcctctacttttttcgtttctgaattggcttcgtttgacttcatcagcagctgcccgagcgcgtccaatcctttgtagctggcatcctctgaagattttgagagttgttttatgctgcctgcgcgatctgcgattccttttattttgactgagagattttctgatttttcgttgatcgtctcaacctctgacgcttgctctgtcgctccggcggcgacttcctctatcgcttttgcgatttgtccgctcgtttcatttgtttcttgtgaaatgacggttagctggtcagatgtatcagacacattttctgaggaggccttgacctgttcgaccatctctttcatattttcaaccatttggttaaagtcttttgttaactcgcctacttcatcttttgatttcgtctgggcgcggacggttaaatctcccgctgagactgaatttgtttttgcgatcagctgctgaatcggcccggttatcgtttttgcgaggaaatagctgagtccgatcgtaatcacaagggcgatcagtgacataaaaatgctcaccgtgttcattttgtcggctactcccatcagctgatctttttcaaactgcgttccgactttccaccctgtttcttttaccgtttggtagacgaccatgttcccctgcagctctttgatgccttctttgtccgcagtgatgtcttttaacgtctgatcttccgaaatattttttccctgttttgccggatgggccagaagagagccgttttcatccgccaaaaacgcaaatcctttatacggaaccttttgctcgttgaccatgctctgaatggaggacagcttcaaatctaagctcgccactccgacgacggttccgctgttttgaatggcttttgacgccgtcacgatcatgtctcccgtcactgcatctttataagggtcagtccagacaaccttatcgggtttttcagccgccatcttataccacgttcgatttgtcagatcatagtctttggcaaaatcggcctttggatatgtaaacatttgtttgtttgcggttccgacgtacgcaagcgcgacatatttgtcattctgtccgatctgttttaactcatcgttaaaaagccgcgcggtttctttcttcccatctgatagaaaagaccgggacaattcaccgtctgctaatctcattaatacggtctcatcatttttcagctgaagctcaatgttctgaccgagtgaattggtgacattctctgtcgtacgttttgcttcctccgtcatcatcggctttaatgtcaaatatgaagaaaccgttaaaaaaacaaccgttacaataagcattgccgatacaaacacagcaattttgatatgcatttttttaaacataaccatcccctcctgagagttatatcggtctttcggccaagaaaatgaataaatcttgaaataaatatcaaacatttccgtcatttgtcgcagcaaaaaaaagagccgtcatgccgacagctccgccttacgtaaaatattcgattttcgctttcggaaaataggtttcgatataagattcgagtgtttcccttaaggcatgttcttcgtctttttggtatatatatttgccgattccgtagcgtccccatttgtacctgcgcttttcttcatcaagctcaagctttgttttcggatagttcttctcaatcacccgtttggccggttttgtaaaacgatgctggatcagttcaaatgtgatgtcatgccgaacgtcttcatcaagcgccgcatccagtttctcaaacagctccttatagccttcctcccagccatcatgaatataaataggcgccacgatgaaaccgagcggatagcccgctttagcgactttgacggcggcttcgatccgtttgtcgagcggagaagttcccggttcaaagttttttatgacataatccgcattgatgctgaatctgaacctagtctttccgttatgttttgcatcaagcaaatgatcgacgtggtgaaatttagtcacgaatctgagctgccccaattcgctttgtccgaaatgttcaatggctctttttaatgtatgtgtcagatgatcgattccgacgatatcagacgtacaagaggcttcaaatcttgtaaattccggcgctcgttctttcatatactcatcagcctgatccagaatctcttctacattgacatatgtccggatgtaaggctttgaccccatcgtcgtctgcaggtagcaatagtggcaatgccccatacagcctgtcgcaaatggaatggcatattcggcggacggctttgaagaatcgaatttcagtgttttccggacgccgattaccaatgttgatttcgcgttccggtattgctgcaagtgatttttccccggaatattccggacttgattatgcgatgttgtttctctgatctcaagccccatattttcaaacttattcttcagctcttgtcctaacgggtattcgagcgctctcggttctatataaacaagctggggcacaaacggcttcagcatgaactgacactcccttttttcatattctcatgttgttactttccgtttaaaagagagtgaatatgcgttgtaaacatttcctttgatcaatgatatcggtcttcttcaaaaagctcgctgtaaagcgcttccgcttcctcatatgttgaaaagaccgcgtcatcttcggccagcggatgataggtttcgtataaaaacagagacagttctccctcatgatatgggtgatggacgatctccgcctctttaatatgggcaacattggcggcatgcggattgcggtaaatcacatagaccgtatcccccgctgcaaatgattttgtcataataatccctcctgttgaacgttattgttccccccttttttccgaatatgaaaaaaaccagacggcttataccgtctggctgttgtattacttattgaatgtttctttaacgaatgcgacaacctcttctgtcgtgctcatagacaagattgtttctttgaatgattcagcttcttttttagaaagcttgctgatctgcgttcttgccggaaggatggatgtagcgctcattgagaactcatctaagcctaagccgagaagaatcggaatcgcaatttcgtctcccgccatttctccgcacattccgacccatttgccctctttgtgagcggcttcaataacaagggtgatcagacggagaatcgccgggttgtatggctgatacagataagctacgcgctcgttcatgcggtcagcagccatcgtgtattggatcaagtcatttgttccgatactgaagaagtcaacttctgtagcaaactgatctgcgataacggctgtagacggaatctctaccatcataccgacttcaatatcgtcagaaaccgctacgccggcttcgacgagtttttctttttcttcgagaagaatcgctttcgcctgtttaaactcgtttactgtcgcaatcatcgggaacatgatttttaagtttccgtatgtacttgcacgaagcagcgcacgaagctgagttctgaagatttcttgctcttcaaggcaaaggcggatggctctgtagcctaagaacgggttcatttctttagggagctgcaggtaaggaagctctttgtcgccgccgatatccaatgtccgcacgacaactgattttccttccatacgctcaagaaccgttttataagcgtcaaactgctcgtcttccgtcggaagctggtcgcgtcccatgtaaaggaattccgtacggtaaagccctacagcttctcctccgttttcaagaacgccttttacatcgtcaggtgtgccgatgtttgcggcaagctctacatgatggccgtcttttgaaacagtcggttcattgacgagcttcgcccactcagctttttgcgccaggtaagcactgtgcttttcttcatatttctttaacgtttcactggaaggatcgatgatcacatcaccatcgatgccgtctacgattaccgtaacaccgttttcaattgtccctgtagccgcttttgtgccgacaacagccggaatttcaagcgaacgggccatgatcgcggagtgtgaagtgcgtccgccgatatcagttgtaaaaccttttacaaactggcggtttaattgcgccgtatcagacggtgtcaaatcttcagccacgataacaacctcttctgagatcatgctcgggttcggaatttccacgcccagcaggtgccccgtcacacgttttgttacgtcacggatatccgccgcacgctctttcatgtattcgttatccattgattcaaacatagtaacgaacatggaagctgtttctttcaaagcgaattcagcattgactgaatctgtgctgattttctcctttaccgggttcagcagctcaggatcactcagaactaaaaggtgcgcggagaaaatgtcagctttgtcttgtcccagttcttttaaagcatgctctttaattttttcaagctcttctttagaacgtacaatcgcttcatcaaaacggcttacttcagccgcagcatcagcaatgtttttcttttcaaccgttaagtccggctcttcaagccggtatgctttcgcaatcgcaattccggctgaagcgcctattccttttaattcttgcattactcgccgagtccttcgcttttcattgtttcttctaaagcgttaagagcatcgttttcgtcagcgcctgaagcggaaattgtgatttcagcgcctttagcgatacctagagacataacgcccatgattgacttaaggtttactgttttgccgttatattctaagtttacgtcagcatcgtatttgcttgcagtctgtacaagaactgtcgcaggacgagcgtggattccggaatctgctgttactttaaatgttttttgtgccatgattatcattctcctttaaattaaagctattttactacacaatattatatcatacagccgtacttgtcatctgacaagcacggcgtatttatatgcttattttccgattttcacaatatctttttgttcccgttttacggtaccttcggccgaaagggaaatcgcttcaccctcggcaagatttgtaaagacaatcggtgtcattaatgaaggaacatgaggtttaaccgcttcaagatcaacttcaagcagcttttgccccggttcaacccggtcaccctctgaaacaaaagaagtgaatccttcgcctttcaggctgactgtgtcgattccgaaatgaatcaggatctctcttccgccgtcagactgaagaccgatcgcatgttttgtcgggaaaacattcagcacttttccgcggacaggcgatacgacgattccttcttcaggaagaatcgcaaaaccgtcacccatcatttttcctgagaacacctggtcaggcacatcggtaatcggatggatttcgccggtgatcggagaagcgaacacttcttcaccctgctcgtttcggagcggatctgcgataacctcctcaacctgctggctgacttcttcttgtgcggatactttcggttcagggcgcggcgtgcgtccggcgataatatcctgcatctgtgtttttaaaccgtcagaacgcgggccgaaaatggcctgaatgttgtttccgacttcaagaacgcctgaggcgccaagctgtttcaaacgagtcttatccactttcttctggtcgttgaccgtaacgcggagtctcgtgatacaagcgtcaaggtgcttaatgttttcctggtcacccattgcctgcaggatttcataaggaaggtcgccggcttcgcctgaggcgcccgcaccttcatccgcagcctcttcttcacggcccggcgttttcagattgaactttctgatcgcaaaccggaaaccgaagtagtaaataacggctaatcctaggccgaccggaatgacaagccaccaagcggtccggttaggcagaattccgaacaggaagtagtcaatcagaccgcctgagaacgtcataccgatttttacatgcagcagctgcataaccataaaggaaagtcccgcgaatacgcagtgaatcgcaaacaggataggagccacaaataagaatgagaattcaagcggctcggtaattcccgttaagaaacttgtcagagcggcagaacccatgattccggctacaagttttttcttttcaggcttcgcttcatgatagattgcaagcgctgccgccggaagaccgaacatcataaacggatatttccccgtcataaatgttcccgccgtcagctgtacgccgtctttgatctgagccatgaaaatccgctgatctccgcggatgatgtctccggccgcatctttatagctgaaaaattcataccagaacggcgagtagaaaatgtgatgaagaccgaacggaatcaatgaccgctcaatcatcccgaaaataaaggccgccaaggttggattcgcttccacaagacccgtggagaaggaattcagaccgtgctggatcggaggccagatcactaacataataagtccgagaattaatgcggaaattgatgtgataatcgggacgaaccgcttacccgcaaagaatccgaggtactgcggaagttcaattttataaaacttgttgaacaataacgcggccaggaccccgacgataataccgccgaacacgccagtcgccaaagtgggtatccccagcatgttaatataggccggatggttttccgcaaaaaactttgcccgttcaattttgtcagacggaatactgccgttcgccataagcacggcgctcatggatacgttcatgaccaggtatccgataatggccgcaattccggcaacaccgtctccgttggcaagaccgatcgcaacccctactgcaaaaagaagcggcaggttgtcaaatacgatttggccggcgctttccatgacgttcgccacaagctgaacgttatcattgcttaagaaatgcatgacttgaatcatatctttgttctgcatggcattccctaacgcaagcaagatccccgcagccggtaaaatcgcaaccggaagcataagagcacggccgattttctggagaacgccgaataatgctttaaacataaaagatgtacctcctctgttagctagtgtgaccttacagcgaaaattcatgacaacgaattcactggcgcaagtcttcagtttaaccgtttacatttgcccttttacacaacaaaaaaggcatgagtaaaaagggtgtgcaaaataacgggatcgttcttcccgttttttaccctcaatcactcatgcctgatcgaatcagtgacacgtttttaaggtttcaactgaaattatgaaattttattggttaatcggtacaaatgaagcgtgagataaaccgcttccgcctcatgaactggttttttcagtatttgctgcaagatttttatcagtttccaagcagtattgtagcatagcgggtattcatttttcaataataacattaacttttctggttcttttgtctgctcttcccgattaatcctgtctatggtaaatctgatatgccggatcagccgcaaatagtggacgctttctttattcactttcatctggaaagagtcctcaatcacctgaacaaggcgggacatcagctgcgaatgctgattgacctctgaaaggggccgattcgtcagggcggaatggatatgcagagcgataaagccgatctctccttcaggaaggcagattcccgtcttttcattaatcatgccgacgacttcacgggcaatttggaattcttccggataaagcgtttcggtttccatgagaaacgggtttttaatgtcaaacccctgctgcagccgctttaccgcaaaggcgatatggtcagtcagcgcaatatggatatgctcatttaacggttggcttgtccgcttcttgatatgataaatgacgtcattggagatgtcgacaagtgtctcgtccacataaccgaggagctttttaaattgtttttgttctttttcatcctttaagatgaacatcttgtcataccctttatcttcaatgacatccgcttgtttttttccaaagccgatcccttttccgattaagacgacctcactgtatctatcatgtgttgcgatgagcacattgttatttaataccttttcaactgtaaaggaccccttcatgatcctcagctcctttgtcattcaatacctcatatcgtacaaaacgaacggaaagcgcgtcaattctttttttagacggttgatcgttcaataaggcggtaatcaagaactttccttcccggaggcccgccgctgatccggttctcaagcatgtgaaaagcctgctttcccatttctttcgtttgtatatctattgtggaaatacctaacatcttgctgatatcatgattgtcgatgctcaaaatcgcaagctcttccgggatgcgcgtcccgtttgccttggcttcaaggtaaagacctgcggatacttgatcattcgccgcaaacagcgcagtcggtttgtcatcccagctcttccatctatgaaaaagggctttcccgtcaagcagcgtcagcaccttttccacaaccagctcttccctgtaaggctgcccgatcttcttcagcgcctctttgtatgcggcgattcggacttgactgttttttcccttttttctggccaggcagatcgctattttccggtgtcccttttctatcagataatccagaccgtgccgaaatgcttcccgatgtggattactgatggaggaaagccctgccgcatcagtgtactggcagaggatgagcggttctttcacggcaagcaaatgctcatcaggaattgctttggagcagataatcaggccgtccacttggcgctcctgtaattgtgataaggcaaaacgttctttttgctgctcataatctgtctggtataaacaaagatgcacgcctgacgcttcggcagcctcggcaatacctgcaacaaggtctgcaaaatacggaaggttcaccgacggaagcacaacgccgatcatatcggaaaaacctttggataaatgaacagcatgaatgttgcgcgtgtatccgagcgattgcatcgcttttttcactctttctcttttgtccttacttacataaggatgatcgtttaaaactcttgataccgttgtaacggaaaccccggcagcgccggcaatgtctctgatcgtagccatggcgtcccccctttctttttttcccttgatctggaatgcgtttcatacagtaagctagaaacagatacatcctatccgtttgaaaggagaagaacagcgatggggattctttgcttaatcggtttgtgtctggccatactcggcggcagttaccttgccctgcggcccctgaatgaaaagcatgacatcaaaccatttcagcattttgatgattttttcatttaaaaggtgataaaaaaggacgctgcgttccagaaccgtccttttttatcacaaagctttctatttcagaatcgttaattctttcggatactgcgttaatgcttcggcgccgtcttttgtgacaaacacatcgtcttctatgcgcacgccgccgacatccggcacgtaaattcccggttctatcgtgtacaccatgccttctttgaggagtgtgtcgttcgcgctgctcattgatggatattcgtgaaccgaaatcccgagtccgtggccgaggcggtgcgggaaatagtctccgtatccggctttttcaataatgccgcgggcttttaaatcaagatcgccgattctgacgccgggtttacttaattgaagcgccgtctgttcagctttaagcaccgtttcgtaaatctcttcctgtttcgggctgattgattggtatgcgaatgttctcgtaatgtctgaacagtagccgtcaagaataacgcccagatcaaacagaacaaaatccccttttttcaaccggtctgcacccggattcccatggggctggcctgatttttccccgaacagcaccatcgttgaaaatgacatgccctgcacaccttttttcttcagctcaaactcaatctgcgcgagtacttcggtttcactcacaccctctttaagcgccgcgacaccgacttcaactccgtaatccgcgagttttgccgcttccctgagaatgctgatttccttctcatcttttacgagacggaattggttgagcgtttcttctgccgaaacaaatgccgcgcccccagaagcttgtttgagctgttctgagcgggaaagagagatcgaatccttttcaaccgcgatggaatcaagcggcacatttcgttttgtgagctcggctttgatcagctcccacggatcttcgtgatcgccgtagccgataataccatgctcccaaccggcgcttcgggcttgtccgtcttccattcccggacaaacgaaaaacggctcctgttcctgaaacaggaacaatcccattaaccgctcatgcggatccgtgtaaaaatcagttaaataaaatacgttttcctttgtatgtataaacgccgcatcatgtccttcttttttcagccaagatgaaacacgttctaatctgttcattttttgattttcctccttaccaaagtgactctttattcattctatcagttttccggcgtttatgctgtgaacgaacattaaaaaaacagccgcccgatgtgcggctgtcatgtttattttaataatctcagtccgttcagtataaccagaatcgtgctcccctcatggccgattacgccaaacggcagttccatcacctgcagaaagttagcgcagatcaaaaggcagatgaccgagagcgagaaaacaatattctgcttaataatccggttcattttccttgaaagtctgcacattttcacaagcttgtgaagatcatttttcataaggactaagtcagccgtttctagagccacgtccgtgcccccgcccatcgcaataccgacgtcagcggttttcagagcgggcgcgtcattaatgccgtctccgaccatggcgattgtgccgtacgtttctttcagcttcttcacttcttttgccttttggtccggcagacaatcggcaacaaccgtcgtcatgcccgcctctttcgcgatggcagccgcagtttcagactgatcgccggtgagcatggctgtttgaatgcccagtgattcaagctcagccatcacggctttggcttcaggccggatttgatcctttaaggcgaagcagcccgcaatccggtcttctttcttaacaaaaaccagtgtaaagcctttatcctttaattcttttcccgatgtctgcaaaaaagcatctgccgcatgttcacctgcaaatcccgcttttccgaccatccatttgacgccttctatttcagcctgaacaccgaatccggacgtctcgtcaatcgatagatggcctgcgggcgcggcgccccggctttcggcaaattcagctatcgcttttgcaagcgggtggcttgattgcttttctatcgcatataccgcctgcatgatctcatcttcactcacattttccgctgcttgaaatgccgcgactgccggctgtccctttgtgaccgtgccggttttgtcaaatgcgatcatccgtacgcttcccagctgctctaaaaacacacttcctttaaccaataatccgttgcgggccccatttgagataagggaaagcgcagcgggcataatagaagcaacaagcgcgcacggggaggcgaccaccataaacaccatcgcccggtaaaaggtttcactccagctccagcctaaagcgaaatgaggaacgaataaaagcacagccacggctaacagcacgcctttgacatagacactttcgaatcgctcaataaatgcctgagccggtgacacgctgttttgggctgattccaccagccggatgatttttctgaataaagactgttcatttgttttcgtcacacggaccgttaaggagccgtttccgtttaccgttcctgtaaacacagaatctcctgctgttttttccgccggcatcgcttcacccgtcagcgccgattcatcgaggctcgtcacgccagactcaataatcccgtctgccgctacgcgttcgcccggcttaatgacgatcatgtcaccgatcttaagttcagcagccggcacccgcttttcccgtccgtccgcaagcagggtcgcttcctccggttccagtttcatcaaggatgttaaatcacggctgcttttattcatcgtatatgtttcgagcgcgccgcttaacgaaaaaataaagataagaactgcgccttccgcccaataaccgatcagggcggagccgacagccgcaaatatcatcagcagttccacatttaacgccttcgtctcaatggtatcctcaattccctcttttgcttttgcaaatcccccgatcaggaaggcaaggatatacaaagtgacggacaggccttttgtttcggtaaaaaaccaggccgcaagaataaggacgccggatacgagcgccgcaatgagttctgcatgctggagccacctttttccggcccgctcttcttgtatcttctgctgttgtgaatgggtttgtgtcatcacttgttcattcattatgaattctcctctctaattgagaacgcaaatcatcttcaattccctgataaaagtaaaacagccgcctgacaggcagcattttcacagtgttatcgcagtgttttctttattatagcatgccggcggaagatttcaattataattgttttaatttctttatgataataattatcattagtgtttcttcagctgttcattatatgcaaaaaaggtgcgggaggaattcctcccgcacctttttatttctctgaccattcttttaattgtgaggcggtcatcggaccgacgatctttttttcgatttctcctttttcattcagcagaaatgacgtgggaatcgtcatgacatcgtattccttcataagctcgcctttcgtgtcaagaacaatcgggaatgtgagatggtgctgagtgacaaagttttgaacggtatttttatttcgctcggcattcatcaaatttaccgttacaaggcttacatcatcagactgatgctgttcaaaataggtttggaattgcggcagttcttttttgcacggcggacaccacgatgtccaaaaatgcaaaatcgttttctgccctttattcggaatcgatatttcgtctccttcaatcgtcttcatcagaaacacggcgggaactgcctgtttttctgatgaggcttttgcttcaggcatccaaacggcggcagctatcaaaaggactgcacatacaattagacggtttttatgcatatgatcttcctttcacgcgtttcggatagcttgcccttccttattgaaatgtatcagccttttcagctttcgatccggggagctgttcttccgccgcccgtcaaaaacacggagacaccgaggtctttgcagatcgtcacgtaatgtaaacttgtcagaagaatcatgccggtattcataccgagtataatgccgagcatttgcaattccggcatagaaccgagcacatacatcattgaaagacctacaatgctgctccatacgttatgataaaacgccgttttcacgtggccgatgccgatcagacaggcttgaagcggcatcacaaacagatgaaaaagaaaaaacggccacaaaagctgcaaataatactgcgcttccggagactgaaaaaacaaatgggtcagcgggcccgcgaactgaaacatgacccagaccgccggaatgccgtagccgaatgtaataaaaatcgcttgtctcagccgtttcagcacaatatcatattgggacagcgcatacgcttctgaaatgctgggaatcataacgaccatcagcgaatgggcgataaatgcgggaaacgaaccgattgtcatcgctacaccggcaagcattccgtattgatcaatcgcggcggtcccggctgccccggacgccagcagcgctcctttaaccaagaagggttcaattgcgtttgtcaccgcatgaaatatacgaagtcccgttgtcgggatggatacggccaggaggcgtttccgcacgtctttcccgcgaagatgaatgtgctgatggccggaaagcgccctccgcgccaaaataaactgcgtatacagataaacgaacaccacaacatcgcttgcgaccagcacaaataacgaaataagcacggccatatcaatttcaaaagagtaccattgaaaaaagataaacagacaaagcacttgaatgatttttttcaagacattcgcaaccgcgatttttcccatttgctgcacacccataaaataacctctggcgatggatgtaaaagcgacgactggaatcagcccgatgacaatccctttaataaacgggtgatacgtatcgaatacaggaatgaacggcagcgcgatgcttgcggccgcggttgaaaacgcggtaaaaacggcggtcattctgaaggcatgccgaagcatgctttcatgcagcttctgattggattccgcgatgaattttgaaatagagatcggaagctccagactggcgatcacgataattaaaaaaatggtgggcagaatgctcatgtaaagccccatcccatgctcgccaagctcccgcgccagtatcatattcacgacaaattccagacattccgcgaaaaaggcggcgatggataaaagaatgatccctttcacaaatcgattcatggtgtctctccttgtctcacgttcttccatcatcatatgagacaagttctgaaaatattttcgatttctcaaaattgaaaaaagcatagcggggatattttttatcccgctatgcttcttacatcgcaaatacgtgtctgccgatccgttcgataatttttcgggaacggatccagtggtcagatgccgttttcggattgtagaaaaacaacgcgttcgtttctctgcccggatggtctagcgcctcatttgcggcggcgatggaatccttatccggcttttgattaatgcttccgtttgctaccggttcaaatgcattcctttgatagatcacgccccgaatggtatccgggaaaccgtttttttcagtacggttcagcactacgctggctaccgcaaccttccctttataagattcacctttcgcttctgcgtgaacgagacgtgacaggagctgtctgtcagcgcgggaatacgtttttttcggcggctgataagccgtctcgtccggttttgctttcttctcttggtgagatgacagctttatcggttggatagagtgcttatgatccgtttctgagagcttcggaaccgggctttttttatttaaatcagcaaccagtgtgctgggttcttgctttggcttcttcgcaaaagtaaacagagcttctgtatgttcaatttttgatgcaggcataaaacatagaaaaaagacagccaaggcagcaaattttgtcgtcatacgatttcctccttaaatacttcactaccttaacaagagctgtacgcaaattcacggttaaagattttccaatgctcccaatcagcttttatgatggaagaagtttgttaacagccttgttattggcaggaaaacagccgtcattttcacaacattaaccaaatagcagtaaaagtatccatcggagggattttacattttgtttacatctgttacagccagatgaaataagcagcgaaaacaaaaaaagactcctcaagtgcgaggagccgtcagcttcttggctgttctaaatactggaagataacatctccgccctgctgggcaataccgcggaaatgcttaaaatcttcctgcttcgacaaaaccgctcgaaatgcaagaaaatgttctttctgcaccctgaattctttgatttcaccgatgcgcatttggttgatacgttctgaaatttcctcaggcagcaacgaatacagcctccttttctcggctttttcccgaaaaacaatataccatctttcccccgccgggacaatgattgagcgggctgatacccatatcgctttacttcttaaagaaaatactgcaaaatattttcaaacaggatttatgataaaggagaggaagctcgtgaaaattgctaaggttggaaacgtcattgaatttaaaaacggattaaccggtattgttgaaaaagtaaatgaaaactccgtcatcgttgatgtaaccatcatggataattatcgtgaccttgaattagattccctcactgtcgtcaaccataagaattataaaatcatcagagactcctattaaaccccccgaacaatccgaaccatttacatatcccgcacaaaagctgccgcccggcagctttttcaaatgaattcagatctcggtcatttccacaaaaaaatcatcggtctcatctttattgtaaagatttgtgacggatgtatagtagttggttattttaccgcggaattcaagcccacgctcgggcgccttgatgtcaaatgttttttcatacaaaaggacggcaatatcatgatacgtttcagaggtcaccttcaatacgaatgaaatcatacggccgtttttacccgcactttctttacaatcatacattttcagccttacaccgtttaactctaacggctccataacgaacactccttctttttacaggacatgctaccatgctggccattcctttacaattgatccgctccgaataagaaaaaacagcgcagtcctttacaaacatacgttccctattttataatgaaacagacgagctgccatccagcacccgtcacgtattgaagcggcgagtacactccccccgggtttactcgtctttttcttttctccaaatgatctctcttttccttatagaagttctgtgcaaatatcatgcacctttttggctgcgtggcagagacgaaaaatacccccgcttaaaaggcgggggtatttaggttatagtccgagtccgtactccgtctgaaattaacgattatcaatcgtctccggatacatatcatgattcatcatccgatgttcggccattttttcgtattttgttcccggtctgccgtagtttgtatacgggtcaatggagattccgcctcttggcgtgaatttgccccatacttcaatgtagcgggggtccattaattcgatcaagtcattcatgatgatgttcatgcagtcctcgtggaaatctccgtggttgcggaagctgaaaagatacagctttaacgatttgctttccaccattttttcatccggaatatagctgatgtagatggttgcaaaatccggctgtcccgttttcgggcaaagcgacgtaaattccgggcagttgaatttaacgaaataatcacggttcacgtgtttattcggaaatgattccaaaacctccggcgcatattcaaataaatagtttgtcccttgattccccaggagcgtaactccttctaattctgattcttttcttgtcatataaatctccctttctattaaactccccgtttattgccccaaagcagcgtatgcagctgaggcaggactctgacgagattcagatccgaatcggctgaaaccttatcaacgagtgtttcgtattttccgagcagatgtgcgatcaatgcccggtcgtccgtcgtatggacgttatcgtttccgacctgaagataaaacgggatattcggataccgcttgtgcacggttttcgcgaattgcagatcttcatcattaaaaatgacgacctttaagctgaccgcgttaagcctttctgccgcatcaagcgaagacataatatgatcgagctttgcaaaatcggttgtcatccccgaacttggcggcttcggtgaaatcgtcaggtcgttaatcattgtgaaccaatcctgatagactgttccctgcgtttctaaagcggcgcgcaccccgtgctctttcagcagcagaatcagcgcgtcaagctgctttaacagcgccgggtttcctcctgagatggtgacatgagaaaaggcgtctccgccgatttctctcagctcgcggtaaatgtcttccgccgtcatccagcggatatcttttttggctgatccgtcccatgtaaaagcggagtcgcaccagctgcaggagtagtcacagcccgccgtgcggacgaacatggttttctggccgataaccatgccctccccttgtatcgtcggtccgaaaatttctaataccggaattcctttagccattcctatcaccttttttcgggcggtatacgcaatagcttgtcggggtttccctgacaaaaacctgcacgcagaccggctgattctccagtgtttcgaggtaggactgcaccttatcataaatcgttttggctacgacctcggtcgtcggcagtgaatatctgtcatcatcagaaaattcctcatggtcattcagcaatgtatggtcataagcgccgtgcaccaatttcttcagcacgctgaaattcacgagaaagcctgaatcgtccagttcatcccccgcaactgtaatatttactgtatacgtgtgcccgtggactctgctgcacgctccggcgctttcgcggggaataaagtgcgcggctgaaatgtgcatgtccttattcaactcaaacgaataaggatgctgaacctgcgggtaaatttgagaaagcaattagttccgctctcctttcattttcatatattcatcatatcctttattgcggagcaggcatgccgggcattcgccgcatccgtccgcaatgatgccgttatagcaagtcagtgtgttattctttacaaaatcaagcgcgccgagctcatccgcaagtttccacgtttctgctttgttcagccacataaggggcgtatgaatgacgaacggcttttccatcgccaagttgacggtgacgttgcaggatttgacaaactcgtcacggcagtccgggtagccgctgaaatcagtctcgcaaacaccggtaataatgtggcgcgcgccgatttgatatgcaagaatcgatgcaaaggataaaaatacaaggttgcgtcccggtacaaaggttgtcggcaattccccgtccttcgcttcaatttcgatatcatctcttgtcagcgcattcggcgcaagctgatttaaaagagacatatcaagcaagtggtttttgacaccgagcttttcggcaatcgattttgccacatcgatttcttcttggtgacgctgattataatggaatgtaacggtttccacttcttcaaagttttgcaaagcccataataaacaagtcgtgctgtcttggcctccgctgaacaccacaaccgctttttcttttttcatgtctttctctcccttatctatcattccataaaaaaagcgcctttttcggagaaggcgccctaaaaaacataaaaaaaccgtatccaaggatacagctcgtccttagttttttatagagggtgtagctagaacctctcccgcatcaatacggattttcttcttttttcacttttgctatcataccataatgttgtttcccgtgacaataaaaaaacagcctgaaccctgtgtcaggctgcaaaagcgggtttaagccccgcgtttcttccccggaaatgccatcagcgcaatcccgatcagaacaaataaagcaggccagaaaacagaaaccggaatgatcggctgatacgtcatcataaagcaaagtgctgtcaaggtcagcactgcaaccggaatgagcagcgccttctgtttcccgccgaacagccacagctcaaataaaccgaatgccgttgccaacaggtaaacaggccatgtcacatcggagtagaaccaattggttgccgtttcaaagacaaacaagatccccgtgatcaataagatgccgcccggtacgagaagccccgcgtttttgacaggtttcgggccgaaaatcggaatgtgaaaagcggcgcccagcaacagaatgagagcgggccagccgcgttcgctgatgacttcatttgcattggtgaatatgccgaaaatgcccgcggcgcacagaaccgccgcagcagtcaaaagccctctttgccttctgccgaacagccaggcttcaaacagcccgaatgcaacggcaaagaggtaaacaggcgatgtcatcgttgcgtatgtccaatccgtcagcgtttcaaaccataacaagccgcccgtcacaagcaaaatgccgcccggaataagaaggcccgatctttttttcggttgcataaaggcagcggcgtgaaacaaaagcgcggctgcgatgatcaaaagcggccacagccccgtcatcagcataccggcaaagcatagtgctcccgcggctgtcaggataaaagcaggaatcaatacgccgatctttctcccgccgaaataccacagctcaaacagaccgagagcaggcgcccatatataaacaggccacgtcatgcctgaatacgtccatcccgttgcggtctcaaaacaaaacaggcagcccagcacaagaaacataccgccgggaacgagcagtcccgcctgttcaggcgtttttttcgcaaaaataaatccggcgtgaaaccctgcggacattataatgaaaagaaacggccacgccgaacctgcggatatatgtataactcccgccttctgtaaaaaaaacgtaatgccgatacaaataaaaataaatcccaataatacacgtcgatccttcatctcttactcctccccatcatttcccaattcattatacagaaatggcaggaaaaaagaagggaattcccaaaatatacagacattttccttatttttctttcgggatttttttgcaaatcaatgcgcccataaaagcgaggctcacatacccaaacaccggataaacggtggaaatcagctgtccgtaaccgatttggctgataatgaaagcaaacgccaaaatgccgccgtaaatatatgtactttttatatgaagaaaactgtttaattgtttttccaatccgtataaattgccgataaccgacgtaaacacttccccgaaaataataaacaaataaatgatatgaagcgaacgcgaatacgaatagacaacttgagccatcggaatgtcaaactccagcacatccggcagcaccgataatgataaaaagctcgcggcaagcaccagtgtcaacagaacgccgcctatataagctccccttctgatcaccttctctgaagacatttcgttcgcaagcggcacaaggacggcttgggcgagcgataaatttaacgcgccgtaagagacggcggacaaaagccagttccacttgtcaggccatacccattcgtccgcgtttctcgtgcttgtaaatacaaatgaatcagctgtcacgataaaagagaaagaaattaaaagcggcaccaccaatatattgacgccgaacacacctttaacaccgcttgtcatgacggcaaaactcagtacgatcgtcagtaggatccccgcttgtgcgggccagccaagctgttcatgaaacagcgctccggctccggacagcatgacagaggtcactcccagcaatataaacatcataaacatgttcacggcgcggccgatggactggccgaataaatatgtgttcaattcctgataagatgctgcatgaatccgtttggaaataatcatgattttggcgcctaaatatgtaaacatcagaccgcttaccacgataccgaacagaccgatccagccaaacttcagaaaaaactcaacgatttcccgtcccgtggcaaaaccggctcctacaaccgtgcctacgtatacaaatgcaagctgacttgcagaaccttttgtttgtcccatttcaccctccggctaaacgcagatttgtccaggcctttatatatgcttatgagacaagtctcccgaaaagacgaacaaatcgtccttccccggaaaaaacagattcagctctctcctctaagcaaaaatattgaaagaaaaaaagggccggcgtatactcttcatcaagaaaggtcaaagcatttcatttcctttccgactatattggtcaaaaataatcaaacctcacgaatatcacttatcatgctgtaaacatttatttttcggggtttgaaacaaaatacttgaaagtcaaagaaggtcagagtatactaataatcaaagaaggtcaaagtttcgaccttattttctaacccatttggtcaaagatgatcaaatatttttcgaggaggttttggcaaatgcgttgtcaacattgtcagaaaaacgaggcgacgattcgcctgaacatgcaagtcaattccattcaaaaacaattcgttttatgtgaaacatgttatacagaattaacccgaaaaccgtctatgagcatggggccgcaatcattcggattcccgtttgagcaaggtttcgctcccaatcaaaataaacagcaggccggccctgaaaaaggcctgcttgacgagctcgctcaaaacgtcacaaacggcgcaaaagcaggtctgattgaccctgtgatcggccgcgataatgaagtggcgcgcgtaattgaaattttgaaccgccggaataaaaacaatccggtgctgatcggtgagccgggcgtcggtaaaacggctattgcagaaggcctcgcgcttaaaatcgctgaaggcgatgtgccgaacaagttgaaaaacaaagagctttacctgcttgacgtcgcttctctcgtcgccaatacagggatcagaggccagtttgaagaaagaatgaaacaattaatgaacgaattaaaagaacggaaaaatgtcatcttgttcattgatgagattcaccttcttgtaggtgccggctctgccgagggatcaatggatgccgggaacatcctgaaaccggcgcttgccagaggcgagctgcaggtcatcggggcgacaacgctgaaagagtaccgccagattgaaaaagatgcggcgcttgaaagacgcttccagcctgtcatggttcacgagcctacaatagaacaagccatcagcattctggaaggcattaaagataaatacgagaaataccacggcgtcacattcagcaatgaagcgataaacgcctgtgttacgctttcatcccgttacattcaggaccgccacctgccggataaagcgatcgacttattagatgaagccggctctaaggcgaacctggaacttgataccgtaaatgaagaagatgcggctgagagactcaatgcaattgacgcggagaaaacaaaagcgcttcaggaagaaaattatgagcttgccgcgaaactgcgtgatgaagaagcagctttggaaaagcagctggcgcatgaaacaccggcctcttcacctgaaatcggcgcggagcatattcaagccatcattgaacaaaaaacaggcattccggtcggaaaactccaggctgatgaacaagtcaaaatgaaggaacttgaagagcatcttcatcagcgtgtcatcggtcaggaaaaagccgtgaaaaaagtggcgaaagcagtcagacgaagccgcgccggtttaaaatccaaaaacagacctgtcggctccttcctctttgtcggaccgaccggagtcggaaaaaccgagttatcaaagacactcgcagatgaactgttcggtacaaaagattccattatccgtctcgatatgagtgaatacatggaaaaacacgccgtatcaaaaattatcggttcaccgccgggatatgtcggacacgatgaagccggtcaattaacggaaaaagtgcgccgcaatccgtacagcatcgtgctgctcgatgagattgaaaaagcccaccctgatgtccagcatatgtttctgcagattatggaggacggccgtctgacagacagccagggcagaacggtcagctttaaagataccgttttgattatgacaagcaacgctggaaccggcgaaaaacaggtgaaagtcggattccaatctgaagagagcgtcatggaagaacaaacgctgattgattcactgagcgcgttcttcaaaccggagtttttaaaccggtttgacagcattattgaattccaatccctgaaaaaagaacatctcgtgaaaatcgtcagcctgcttctcacagagcttgaagacacattaaaagagcgcggcatcagcctgagcgtcaccgatgatgcgaaggaaaaaatcgctgaaatcggctaccaccccgctttcggagcacgcccgctcagaagaaccatccaagaattgatcgaggacgaaatgacagatcttctattggatgacaacgaaatcaaagccttccatgtcgtaatggaagaggacggcatcaaagtccgggcacaataagaaaaaagcggttccctcctcgcggggagctgcttttttgtttctttctccatgccggaagggagaaactgtgaagaattcgggaacaatttttcaatcaccctaaagttccatgcactgccaccgatattaaccatagaaagctagtataaaggatttggtgaaaactatggataaaacatcgattatcggtatcatcctcgcagtgattgctttaagcgtgggcatggtgctgaaaggggtcagcttaagcgcactcgctaacccggcagctattctgattattttgttcggtacgatttctgcggtgatcatcgcattccccggaaaagaaatcaaaaaagtgcctgccctttttaaagtgctgtttaaagaaaacaaacagctgacaattgcgcaactaattcctatgttctctcaatgggcgcaaatcgccagacgtgaaggtctgctcgcattggaagcaagcattgaagacgtggatgacgcatttttaaaaaacggcctgagcatggcggttgacggacaaagcgcagaatttatcagagatattatgactgaagaagttgaagcgatggaagacagacaccaggccggcgcagccatctttacacaagccggcacatatgcgccgacactcggcgttttgggtgcggtcatcggccttatcgccgctctttccaacatgaacaataccgaggcgctcggacatgccatcagtgcggcgtttgtcgccacccttctcgggattttcacaggatatgtactatggcatcccttcgccaacaaactgaaacgcaaatcaaagcaggaagtcaaactgcgtgaaatcatgatcgaaggcgttctgtcagtgcttgaaggacaggccccgaaagtgatcgaacaaaaacttctcatgtatcttcctgcgaatgaacgcgcaaaagtcgctgaacaagaaggagaggcaaacaatggcgagaaaaaagaagaagaagcatgatgacgagcatgtggatgagtcttggctgatcccgtacgcggatttgctcacccttcttttggctctgttcattgtattgttcgccatgagctcggtcgatgcggcgaaattccaaatgctgtctaaatcatttaacgccgtgtttaccggaggcacgggtgttcttgaatattcaagcgtcacccctcctgaaaacgaaaaagacggcgttgatcagttaaaaaaagacaaggaaaaagataaagaacagaaaaagaaagaaagagaagcagccgaccgcgaagaacttgaaggcgtgcaaaagcaagtcaatcaatttataaaaaacaaaaagcttgaaactcagctggaaacaaagctgactaaagaaggactcttaattaccattaaagacagtatcttttttgattccggacgggcggacatccgtcaggaagatattccgcttgccaaggaaatctcgaatctccttgtgctgaatccgccgaggaatattatcatcagcggacatacggacaatgtgccgattaaaaactcacaatatcaatctaactggcatttaagcgtcatgcgggccgtcaacttcatggctattctcacggaaaacccgaaacttgacgcaaaagtattcagcgccaaaggtttcggagagtataaaccggccgtgtcgaacaaaaccgctgaagggcgcagcaaaaacaggcgcgtcgaggtattgatacagcctagaaacgccgcgactgaccaaaatcagtaatataaaaaaggaagcctttcaaacggcttccttttttatttctgatgaaaatgtttagcgtttaaccccactcttttcagcatttccgtacacatttctatctcttcatcactcagcacactgatcatttctttaatttcttcagcatgatcagggaaaatatcgtccaaaagacggattcccttttcggaaatttgtgcgaaagtcactcttctgtcagtcggcgaggcttttctgatgagaagttcttttttctctaatttgtcaacaacatatgtaatacttccgctcgctaataaaattttgtcgccgatctgctgaagcggctggttgcctttgtggtacagcagctcaagcaccgcaaattccgtcgggttcagaccgtgcttatgaatatgtttattcatatggtcgttaatagatcggtacgcacgtgacagtacaataaataatttcaatgagttttctgttttatccgtcatacattcaatcatccttttacaaaagaaaccgttacagagaaacattaataaacaaaatgaaaaatgtcaacaaaaatgtttccaaaatttctcttctttttgtctggccttaataaaataatttgtttttctatcattttggttattttttcttattaaagaagtataaaaatgatataatacctctattcaagtgtaatgttggagcgatgcagagtgaatacatttaaaggtgcccggggaaagatcaaactttatctcatattggtgatcatcccggcacttattatcagctttttcatttatgaaaaagaaaagcagaaaatagccgataaacacatacaggaagccagtatgatgctcaaccttcaccgcaataagctcaattatttaatcggtgaaacaaaagcccggatgacaacacttgcgatcgctgtcgataagcctgtcaatgaagaaaagatcattgatattctcgatcaggcttttgaggatgaacccagattcagcggtctgtatatgctgaattccaaaggtgatgtcatcgcaagcacgactgatctgaaatcaaaggtgaatttggccgaccgaccgtattttacgaaggcgaaaaagacgaaaaaaacggttatcacaaatgactactccagcagaattacaggccagcgcatcttcacgatctgcgtgccggtgttagacgcaaaacgggaagtcacggattatttagtagccgccattcaagtcgattatttgagaaatatgatcaatatgctgagccctgacgtttatgtcaaggcaaccaatcagaataaagtgatatttgccagcggacgggctgatcaatcagaaggggtgaaaccggtcagcggctatctggatgatattaattggaatatcaatgtttatccgaaaccggttgagctgaacgagctgaccaaaagcgtactgctgccgatgtccagtattgccgtgctgctgaatattctgttcatcctcgtccaatattatctgcttaagcgcaagacccagctggagcgcgctcaaaatgaagcgcagaaattggagctgatcggaacgcttgccgccagcaccgcccatgaaatccgcaacccgcttacagggatcagcggcttcattcagcttttgcagaaaaaatacaaatcggaggaagatcagctgtatttctcaattattgagcaggagattaaacggatcaatcagattgtcagtgagtttttagtgctcggtaaacccactgctgaacggttggaagtgaactcgctgcaggatattcttgatgagattatgccgattatttattctgaagggaatctgtataatgtggaagtgaatgtggagattctcgtcaatcggccgctcaaggtcaactgcacgaaagaccatattaaacaggtgattttaaatgtcgcaaaaaacgcgctggaatccatgcaggaaggcggccggctgtccatctatttagaagcccgcgaccataaagcagtcattaaggtggccgacaacggaatgggcatttctgaagatatgcttgaacacatttttcttccgtttgtaacgtcaaaggaaaaaggcaccggcctcggccttgtcgtatgtaaacgaatcatgctgatgtacggcggttcgattgacattcaaagcgaagtcgataagggcacagaggtcaccattacccttcctgccgcttcacgatgaaaaaaacaccctgggtcggggtgttttttatttaaagaagaatatgtgtaagaggatataccagaggaacggcatcatagccggcagatagtacgaggcgcttcgtgagccgtgccagcggaaaaatctgctgactgtacgcggtcatctttcggatgcggcgcttgatcaggaagcgcattcagtcttcgttatctgttttatcatcaatcatttgtttgcttcatatgcaggcatgacgtcaccgcgggagaacaagcctattttcttcacaaggccctgtattccttggtgatgtgtgcgatcacggtttaccagctgctgatacgcgttcatcagacagtccagttcctggctgtgcctgatcgtgtcatatccggtaaacccttgtctgttagccgcatctatcatcatttttctttttttatcaatagatacaagcaatttttcttgttcagaataactgcccattcacttcacccctcaccgctaaaagaataggaaacaagtttgattgggttattgagcattattacagattatactttatttgtaaacatttttttactaaataacttattttttcatttcatattggaatctttagcatgaatacgagaataatacccattcaggtaatgatataaacagaatgcggcatattcaagatttaaaaaacagccacagctgactttatattacaataaaaaacctctcataccggcgggggcatgagaggttcgggcgtctatcagttttgcacactttcattttcgtaaatcggcacccagccctcagtcgtcacgaaaattcggattgcgacgacccggcggtcttcctgaagcgtaaagtagtggcggatgttctccggaactgaaatcaaatcgcccggatttaaacggacgtcgaaaaatgtgccgtctttgccttgaatgacgaagatgccgtgtccgctgacgataaagcggacttcatcatccgtgtggtgatgttctctttggaaattttttaataattcatcaagattcggcgtggtatctgataaagaaatgacatcctgagactgatatccgcgccgggctgaaatgtcctgaatctccgtgtcaaacgccgcgagaatccgttctttttcatcttctgtcagattgtatttctccgaaagctcagacggaagtttttcaatgttccactgctcatagatcacctcttgttcgtctaaaaagcgcgctacttcttcctgattttcaatgagcgtattcttttcgtcatgtattctgatggtcgccattttccgttcctccttttattttacaagctgcggccgcagtgacagaagcttgaggtggcagctgaataaaaattcataggcttccagcacccttttcgcttcaaatgcggtccgcccccatgccgtaatgccgtgattacggattaacaccgcgcctgagccggcgtccgcatggtgcgcgaagttttcggccaatgccgggatgtgcgccgggttgtcaatgatcggaacggtcacggacgcgttttcctcccataatccgagcgccttaatcatctcctgcccctgaaacgtgatttgtttttcatccccgtaaagctctgagatgacattattattaacggtatggacatgcagacagcagccggcttctgtcttttggtataagtaagtatggagaagcgtttccgctgaaggttttaaagaatggccggtctcagcgggcttcccgttctcatcgattaagagaaaatcttcgtctgtttcttttcgtttgtcttttccgctcgccgtaacgaggaaagtcagcggcgcgtcggatactttgatggaaagattcccgctcgttgccgggaaccagtctctttcggccagctcgcgctttacctcggcaagttcgcgccagcgttcttcttttacagccacgcctgcacctccccgatgttttcaatgcctgttttcacctcatgaaaatcttgaaaaggcagatgccggaggccgagttctttgcattcagtcaaaagataatctctcgcaaaacacatatcggataactttgcagcctcaacatccgtgaccgaatcaccgatcataatgagaaatttctgctgatcggacagcttccggatgactgacggtttgcagcagccgcattgattggtgcagcctccgtcacaggcgtgcggccagtctatatgaatatattcattgtcaaaggatgcatgattgcagaaaatccgctccttttctacgatcccttccaaaagcggatgcacaaaaaagtccattcctccgcttacgatataaaacgggaggccgtttgaccggacaaacgagacaaaatccaaaaagccgtcccgtattttcgcatccttcagaataaagtctgtcagttcttcttttaagctgctcggcagcagtccgaacatccggccgactccttcttggattgataggcttttagacagaacaccgtcttttaattcaatccactcagggggcgcgaattctttcatcatgctgacaatgttgtcgttcatggtgaccgttccgtcgaaatcacaaataatcagcggtgtgcgggtcatacggcttccacccttccccatttgtctaatgcgagctgaagatctttgcacgacgcggctttttcttcaatcggctgcgcttcaagcaccgcatcaatgatggcgcggaacgctcttccgccgccctcggctcctttcggatggccgtgaatgcctccgccggcattgatgatgtgatcgatgccgaaatcgcgcatcaacaatggcaccataccgggatgaatgcctgccgacgggacggcaaacgacggatgaaagacatcgtcttttacacattcatcatggattgcaagcgcggactccttcggaagagcaacggatccgtaaggtgacggaaataaactgaaatcagcgccgcaatagcggttcagcttgccgagcaaaagcgcatgcgacaagccgtaaacgggagatgaagtgaacgcgccgctgactgccggatgcgccatgatcggaagcgggatttccctgtcttctgcaaggctctgcatcacatctaaaccgtaagcgaacacattcaataaaagcgcgtccgccccgagttctgccgcgcgcctcgctttatcccgcagttcagcggtccttcccgtaaggtttacggcatacagcgttttatgccccgtctcctcccgggtttccttcaggacttgttttccttcgataatgcgggtttcaaacggagccagttcattttcaaagaaaatttcgtcatctttaatcagatccacgcctccgagcgcctgctgtctgagctgttctttaatgtcggcgagattccgtccgatcacgcctttaaatatgctcatcagaagcggtctttcaaattcgcccagcagtttgcggatgccgtatataccgaatttcggcccgggaagggagcgtttaaacccttcggaaaattcaagatcagtcaattttatttttccgtccaatgacagctttccgaataccgtcgtcaggacggccggaatatctcttgaaaagttcgcctcgggataggcgatagtgatgacggattgtgtttcgttttctgaggttccttctttctcctcaacttttacgacccggcctttatgttttctgagctgttcctgcttcaccaggggcaggtcagtccaggagcctaccgtcagccccgccgcaatctgttccgcccgcttttcactgtccgttgtgtctgtcagaagatatgttgccaatacttcgctcatgcgtgaacgcctctctttctttcacaaaacataaaaaaacctcttccgtatgagcagaaagaggcttcgtgttatgtccgaatcttatctctcagctcctgctgcaagaattagcaccgtgctttatcagtcggttgccgggcttcatcgggctcgtccctctgcctgctcttgataagaataatgattttataaagtattttgaattatcgcattgttatccagatatgtcaatgctttttcgggtgaaaagattcagtttcccgatccgttccgcagcttctttaagtctttcttcacttgtcagaagaccgactcttatatagccttccccccattttccgaacccgtttccggcagcgacggcgacatccgctttctcgagcagcagatctgaaaacgactgtgacgtataaccgtcgggcacagggagccatgcaaaaaaggagccagccggagccgtcacatcccagccgataccgcggcaggcttcaatccatgcattgcgcctcgattcatatctgtcattttgcgctgcgacgcatgcctgatcctctaaaagagcggctgccgccgcctgctgcgccgcgggaaacaggctgacaaacatatgatcctgataaagattgatcgcttcgatgacagaagcgtttccgacggcaaatccgacccgccagcccgccatattatacgttttggacaaggtatagacttcgattcccgtctcctttgcgccttccgtctgcaaaaagctcagcggtttatgcccgtcaaagccgacggctccgtacgcgaaatcgtgaacgacacaaataccgttttgttccgcaaaaccgaccgtctcctcaaaaaacgcctctgtcgccacagcgccggtcggattattcggataattgagatacagcagcttcgcctcgctccgcaccttttcaggaattacgctgtaatcagggagaaaccctctttcttccgtcagcggcatcatttccattttcgctttcgcaagggcgacgcccgaccagtaatcaggatatccgggatcaggcaccagaatggtatctcccgggtttaaaagacattgcggaagctcaacaagtcccgccttgcctccgaacagcacggcgacttccgtgtccggatcaagcgtgaccccgtactccctttcataaaatgcagcggctgcttttttgaagctgtaagcgccccggaatgatgagtatttatgattttccggcctttcgacggcgcgcttcatttcttcaacgatatgctgaggcgtcggctgatcagggtttccctgccctaaattgatgacgtctctgccttctttcagcttttgatttactttttgcaccaatgatgcgaaaaattgttccggcagctgtttgagtacatctgagatttcaaagttcatatttttcaccttctaaaaatgtcttgaaatgatagtccatcatcatatatggttaaataaaaaaagtaaagagaaacttgaggtgttaaaaaatgaaatggaccgtttcctgtttgcaatttgatatttcatacggaaatccttcagaaaattttaaaaaagcggaatctttgattgagcaagaaagccgccatgcggatgtaatcgtgcttcctgagttgtggacgaccggctatgatctcacacggctagaccagctggcggatgaaaacggcaaagtttcggaacaatggcttaaagaaacggcaaaaacatacaacgtacacctcgttgccggatcttttgcggtcaaagaaggcgaaaatgtctataacaccatgtacatcgccgataacagcggacagatcgtgaagcggtatcagaaagcccatctgtttcagctgatggatgaacacctttacttgtcagcgggaaacagcgacggttcctttgagctcgacggtgtcaagtgcgccgggctgatctgctatgatatccgtttccccgaatggatcagaaagcatacgtcccagggcgcgaatgtcctgtttatctctgcggaatggcctctgccccgccttgatcattggcgaagcctgcttatcgccagagcaattgaaaaccaatgttttgtcgcagcctctaactgcacggggtccaatcccgataatgaatttgccggccacagcctgattattgacccgtggggccggattttagccgaaggagaccggacggaaggcgcagtccgggcggaaatcgatgtgtcagaaagcgcggccgtccgcggaaccattccggttttccaagacttgcggcgtgatttatattaattttcaaaaaaatgttgacaagaatatccggcacctgctaatattttcatcaactgattaatccgaattgtgatacaaatcaatatattttctcttatcgagagttgggcgagggaattggccttttgaccccaacagcaaccgaccgtaattccattgtgaaatggggcgcgtacattttgcgccgagacgattgtctcataaggcacggtgctaattccatcagatgttatctgagagataagaggcggactgcactgtttcagcctccttctctttcagagaaggaggctttttttcgggcgtattctccgtcacgatctcttactgccactacataattggagggtaaatccatgtcagcaactaaaacaagtctttatgaacaattaacagaaagctccgccgccgcgttagccgtcaagctcggcttattccaaagcaaaagcactctgacatgccgtgaaatcggcgacggcaatttaaattacgtctttcatgtttacgataaagaaaaccaaaaaggactgattatcaaacaggcgattccttacgcgaaagtcgtcggtgaaagctggccgcttacaattgatcgggcgagaatcgaaagcagcgccctcatccgccagggcgaacacgtgccgcacctcgttccggccgtttactattccgatactgaaatggccgtcacggtaatggaagacctctcacatttgcagatttcaagaaaagggctgctggaagggcagcattatccgaacttatcggttcatatcggtgaatttttagggaaaacgcttttttactcatccgattatgcgcttgatgcgaaagtaaagcagcagctcgcaaagcagtttacaaatcctgagctttgcaatattacagaaaggcttgtgtttacagaaccgtttctcgaccatgagaccaacgattttgaagaggagctgcgcccgtacgcagaaaaagtttggaacaattcccggctgaaagaaggcgctgacgaattgaaagccatctttctgaattccgcggaaacattggttcacggcgatctgcacacgggaagcatcttcgccgatgaacatgaaacaaaggtgattgatcccgagtttgctttcttcggaccgatcgggtttgacatcggccaatttatcgccaatctgctgttaaacgccctcagccgcgacggtgacgacagacagccgttatatgaccatactgccgccgtatgggatacatttgtgaaaacattcagtgaagcatgggagaaagactgcctgccttcccacagacacctgctggaagacacactgaaaaacgcgtttgaggaagcggtcggttttgcgggatgcgaattgatccggcgcacgatcggactcgcccatgtggctgacttagatgaaatcactccgtttgacaaacgaatcgaacggaagaagctggcgcttgagatcggcgcctattatatcgaaaacagaaaagaactgaagcatatcaccgaagttctggaccaatttaagctccgtgtaaaggaatgatgcagcatgaccaatgaatttgccatcccccgttccgtggaatggaaagaaacctacatccgcattttaaatcagcaaaaacttcccgacgtcactgagtatgtggaacttgaaacaaaggaagatgtattcgacgcgattgtcacgctgaaagtaaggggcgccccggccatcggtataaccgcggcattcggactcgcgctctccgccaagtcatttgaagcccgcgacctttcagatttccgacgtcagttcgcggatgtcaaagcgtatttaaacagttcgaggcccactgccgtcaacctcgcgtgggcgcttgacagactgacggattccatcagggatgcaatctcaatcaatgaagcgaaaacaacgctcgttcatgaagctattcaaattcagattgaggatgaagaaacctgccgaatgatcggccaaaatgcgctgcacctttttaaaaaaggcgaccagatcatgaccatctgcaatgcgggctcgattgctacaagccggtacggtacggcgcttgctcccttttacttagcgaaacaaaaagacctcggccttcatatctacgcatgtgaaacaagacccgttctccagggatcccggctgacggcgtgggagctgatgcagggcggaattgatgtcacactcattacggacagcatggccgcccatacaatgaaggaaaaacatatatcagcagtcattgtcggcgctgacagaattgctaaaaacggagatacggccaacaaaatcggaacttacggcctcgctattttggcaaacgcctttcagattccgttttttgtggccgcaccgctttcgacctttgacttgcagattgaaaacggcgatcagattccgattgaagaaagagatccggatgaagtcagacagatctcaggcatacgcaccgctcccgaagatgtgccggtcttcaatccggcctttgacatcacaccgggcagcctgatttcaggcattatcaccgagaaaggaattgtgaccggttcttacacggaagaaattgaacaattattcgcagactgtcagctgagctgaaaaaccgctgatgatgttgcctcgggcaatgtcagcggtttttttgtctgcacaatgtaatcacttcatctttttgggcggctgtaatgagatgcattttaaaaaacagctctgcataaccggctatcttttgcggacggctcattttcatcaggcttcgtcctcctttttcaccagaccaacttttttcacttaataaaatgatatgtcggacgcaaaaaaacggaacgtgccatatgttttatttttctttataggatatttgttcgatgttcagcagcaccgcttttacatccgtcttcgtgcccgcgtatcccgttaaggcgctgtttttgccgattacccgatggcacgggacaaaaatcggcagccggtttcgtttattggcttgtccgatggcgcgcaccgctttcggttttccgatcgcttcggccatatcgccgtagcttcgggattccccgtaaggaatcatcgtcagcgcgttccataccctttcctgaaagggtgtgcctttttgtctcaaaggcagagagaattgctttctttctcctgaaaaataggatgccagctgctgtttcgcctccgacagcaaagcggtttcgcacggctttacgccgggcgcgtctttccgccattcctcaaaatcttccccggtgagaaacaggccggtaataaagccctcttcctctgttacgataacggttccaaacggcgcttttacacttgtaaaacagatcattccccgctccttctttcttcggtattctgccggatcggaagcgtcaaatgaaaaaccgtgcccttcccttcttcactttccacatgaatgcgtccctgatgttcttcgatgattttatagctgaccatcagaccgaggcccgttcccctgtcttttgtcgtgtaaaatggctcgcccagacgttttaatttgtcttcggaaatgcctgttccttcatcttgaaaagaaatcaaaatgtggtcttgatcagaaggctggatggtcacgtagatattgccgccgcccggcatgacttcaatggcgttttttaaaatattgataaacacctgttttaattgattcggttcacagtaaatcggcgggatgtttccggtcaggttcagatgaatctgcacattgacaagattggcctgggcattcaaaagatcagccgtgtctttcagaatctgcgtcacgtctttttcttcatataatatcgcctgaggtttcgctaaaattaaaaattcagtgatgatagactcgatgcgttttaattctgaggtaatgacgttaaagtacagggaatattcgccttcaatgcttccttgaagaagctgaatgaaccctttcagcgctgtcatcgggtttctgatttcgtgggcgatgcccgccgccagctcccctacaacatgaagagtgtcggatttccgcagcctctcttcaagttctttggcctctgtgacatctttaaagatggccagattcatattttgaatgatatttcttttgaaggagaattccagtttgcggctgtcactgctgcttaacaggaaggggatttcattatccattccttctaaatcaatctttctggcgggaacacccgcgttttcaatatcaaataaagaaagaatatccggaacggtgtacgctctcagctcctcatccggcatgccgagtatacggcttgcgagaggattcgcgtcaataatgcggaattggttgtcaaataagaccttgccgtccattgagccgttgaatacttttctgaatttcagctcgctttcccgcaattctttttccatccgcttacgatcgctgacatttcttaaaatggttaaatgctgaccttcaagtatggttcgttttgatgtaaactcaagctctttgtattggccgttcgccatctgaaacagcatttcttcacggatttccccgtatttttcatatttcttcttaatctgcttgtattttttctgcggatcaacgataaacgtacataaattcgtctccagcagcttatccatcggcagttcgaaaatgcggcacgccgattcgtttgctttggcaatctttccgtcatcagaccaaatgacaatcgcgtccatcgcgttttcaaaaatttcgcggaatcgctcttcgcttttaaagagtttcaattccatcaaccgtttctctgttatatctctcataatggacatgtagaacccgctgattaagttggacgtaatcgtaaattcaaacagcttctcttcgccggaccgaagcttgacgggcagttctcctttggcatttccttttctgcggagggtttcccagatttctttcagatgctttttgttttcgccgtcggtaaaatggcggagcgacagatgggacaattcattctggccgatctcaaagcttttgcaaaaagagaggttcgcatcaataaacccgccgtccttatcaaacagcacgatgccgtcgacagccctgtcaaacaaatctttaaacagctgctcgttcatggagaattcgcgctctaatatttttttagaggagatgtccctcatcaccacaaaaaaataatcctccccaattccgtctctggcgaggaattcaatgtatttcgtcgcgccgctgtcaagcttaatcggcacctctttccacagatggcctttttttaaaaactttttcacggccttattcagttcttcctgaggcacggaatataaaaagtccaggacggagcggttaataaggctctctgcctcaatctgcatcatccgggccgcagcctcgttcgcctggacgattttcatttccttacggcatataaaaatggcatcaagcgtgttattcataatcacatgataccggttcaaatcactcttcaggcggtcattttcctctttcatccgcttcagctgctctttcagcgactcgtttgtttgcaaatccagagtttcagccattcagtacactccttcttcaaaaacctatccttcaatatttctacaaaatacctcatcttccttcattcgccctatacatttcagaaaatttcaatgatatgacaagttaaagtctttttctacgatccttacctccccgttacatcatcctaacaatcccttttgtcctccttcaattttttgttttttattttaaaatgaacaccaacaggaaataatcatgcagtggatgatttttgaagagaaggtgatgctatgacaaaatcgcgagacagttactttgacaacgccaagtttatcttgatttttctggtggtgttcggccatatcctccggtcatttattaacggaaatgagtttatgctccatctctacaaattcatttatacttttcatatgccggcctttatcctggtttccggctatttcgcaaaaaactttaagcggaaaggttatgtgaagaagctggctgtgaagctgattattccgtacctgatttttcagggcatttactcggttttttactatttgattcaggatgaaagcatggcaagcgtcaatccgattgatccgcagtggtctctctggtttttagtcagcttattcttttggaatctgctgctttatccctttacgaagctgccgaaaatgtgggcgcttggggcgagctgcgggcttgccgtcatgatcgggtatctcgatttcatcagcagcacgctgagtctttcacggacgtttgtctttcttccgatgtttctcgtcgggttttatttaaagaaacggcactttgatttgcttcgggctaaaagaggcaggcagattgccgcgggcgtactggggattgttttcctcttatgctggtgcattgattttgattactcgtggctgttcggatcggagccttattctacattcggcacagtgtcgctgttgagcggtctgtcgcgcatcggctggtatgttttggcctttgccgccactttcagctttttggcgctcgttccgcaaaagcgttatttctttacgaaatggggtacgagaacgttttacgtgtatctgctgcatggattcattataaaaacgctgcggcagatcgggcttgaagatcacttgtctgattatcagaatttagtcatgctcttaatgttaacggccgctcttacgtccattctctccagcaatgcggtgaaaacggccgcacagccgtttattgagctgcggataaccggcttgcttcaagcggtgaaaggaacaagaaacggtgcttattcgaaataatgcaaaatacctcttaagcgttgccgcttaagaggtattttttattttttgccgtcttcttttttcttcggcttcgtctgttcaagcgtttcaatccattttccggcgttataatcaccgagctcgcttgaaaactcttcttcaagcaatttagggtccatcggctttttatggttttgcatgtctttgctgtggcggttttttttcgtcatattactcgcctccttgtttgccgtgttttgatttgcggtttgcgcctctcagtccgggatcaccgtcatattgtgttttgtatgcatctttgtccatgctctcagtcggtgtattgttgttggtcaaagcttcattctttgctgctttgcgtttcatttgatttcctccttctgtcagcaaatctgttttgaattcattaagcattttttttaagtcgcgcactgtcacgtttttggcctcatcaatgagttcatagccgatctgtccgttcggctcaagcagcacatatttaaaatcttgaatgtctccgaggccttcctgcctgatcctcattgacagctggtcttcggtaaaacgcattttttttaagttttccgggatgatttttccgtttctgacaacggcgacggtttttcctgaaaatagaaactcaaaaaagcttgatttgatttctaaatattccatcagaatcagtaccgcaataaaaatcgccgccgcgaaaatggtttcccataaattatgttcaataaacggctgaataataatcgagccgatcgaaatcatgatgactgtctgggtcaccgacagctggctgatggatttccgtccggcaatccgcaataaaaaggtaccgaccgcgatcataactaccgacttccaaaatacggcaaacaatgacgtcacctctttacaagtagaatctccaaagaaactgtttccactcatccattttacggcaataaaaaaacaccgctttctgaaaagcggtgtcagccgataatcatcctttccttcggataatgataatttgcttcgatttcttttcggccgatcaaataaaggaaagtcaaaatgccgatccggccgataaacatcacaatcatgatcacacattttccgatatcgcttaaatgcggagtaatcccgagcgacaggccggtcgttccgaaagcggaacacacttcaaaaagcagtccgaggagcgtctgatttgtctccgtcacggaaagaatcagcgtcgacccgaacacgagcagaatcgccatcatcgtaacgaccagcgacttcatgacatcagcctgatgaagctcgcgtttaaagaccttgaccgctttattccctctggcaaaatgaaacagagcaagaaggttaagcgcaaacgtcgtcgtacggattccgccgccgaccgagctcggtgatgcgccgataaacatgagggcgcagatgaaaaataatgtcggcgccgacagctggctgatatcaattgtcgcaagcccgccgcttcgcgtagcagttgattgaaagagacataaaaataaaacatcatgccagcttttccccttcataacatggcttgcttcaagcgcgtaaatgcccacggctccgaacaaaacgagcattccgaacgtaacggtcgtaattttcgtaaacagcgtgaatgagtatctgcgctgttttgaaaacaaaaagtcttttacttctacgagcaccggaaaaccgatcgcaccgaaaataatcagaagcatcgtaataaactgcacgaaatagtcatgtctgaacgggacgagtgaatttcccgtaatatcaaagccgccgtttgtcgtggcgctgacgctcgcaaagaatccgtgcaagtacgcctgttcaaacgaatcatagtatgttaaaaaatatgttcctaagatgatgccgcctaaaaactcgattaataaaatcaaaaacagcacttgcttcatcaggttgacgataccggaaaactgcgattgattctgatccaccataatgagcttccgttcccgcagaccgatccgtttgcccataatgagccagacgaatgttccgagcgtcataatgccgattccgccgaattgaagcacgaaagccaaaatgacaatcccggccgtgctgaatgtatcagccgtgttgacgaccgttaaaccggtgacactgactgagctgacagccgtaaacagcgcgtctataaacgaccagctggccccttgtttgtgggcggccggcagacttagcaaaataaatgccaccgtcacagcaagaaaatagtataatgcaatcagctgtgcaggcgacaagatctgtatgaatttcttcagttttaatttcataagatagttccttctgcctctcaaatgtagtacgtaattattctaatgatattgggagaatttttaaaggccttttttgaaagatttttcattaccttatgtaatttgccgatctttaaacaaaaaacctctgaaacgattgtcagaggttttgtttattattttgcttccagcctgcggatgcgctcatcgagatcagggtgtgtggagaacagtgacgaatgctttttgccgttaatttttaacgtctgcaccgccgtctggtcttcttcattcacatgtcctgtataagacttcagcgtacgcagggcgtgaatcattttatccttgccggcaaggtctgcaccgccgcggtcagcgtgaaactctctgtggcgcgagtaggcgaagacgacaagactgccgagaatggaaaagataatctgaaacacgatcatcgcgataaaatgcacgaccggtgcgaggtcttctttgacaaagcggcttgcaacccatgccgcgattcgggaaaggaatacgacgaacgtattgacgattccctgcagcagcgtcatcgtgaccatatcaccgtttgtgatgtgtgcgacttcatgggcaagaaccccttccaccgcagcatcatccatctgctgcaataaacctgaagaaaccgcgacaagcgaacggcgcttagaaggtccggtcgcaaaagcattgacctccggggactgataaatgccgacttcaggcattttcgtcatccctgcggcacgggacaatctgtgcacacggtcaaccaattgctgttcttcatagctgagtgactgtttcttcggatttaacacccggacgcccatcatcgttttggccatccatctggacattccgagagaaataaaagaaccgacaaaaccgacgacaagactgaacacgagcaatgccatcagatcaatgcggccattttgtatatacgagccgacaccggtaacgcttgtaataatcgtaagcacaattccgattgtcgtaatgaccaaaaggttcgttaaaataaacagaaatattcttttcgccataattacctccgtcttttttaagatcaaaagaacttatttaattaaattataaatgatctgtttgaaaatgcaacaatttcgacgtatgatgtaaatgtaattctcagtgatatcagaaagtgaacacgtaatcaatcagaggtgaaccatgaacacgtttaaactgacccgaactgatatggtccggcttctttacgcgttaaaaggccaaggagacgcaactcctctccaaatcttattgcaatcagcggaaatgacattggatgaagcggaaagccgtctgcatatccctgaatttctgacgagattcgaacgaaaaaaagagaaaaaggaatacgggctttcaactaacgagattgtcgagctgggaaatctgtgcgagctgacgtctttaaaatcaaccgccgtccaaaactgggtgaagcgcgatattaaagatttaatcggccaccccttactcggcaaaaaatatacaattgaacaagctgtcatccttctcattgtacgtgatttaaaatcaatttatgacttcgaacatatacgcggcatattaaaaatcgcttttaacacgatcacagacagatcagacgacgtcatcagcccgatcagctactatgaaagctgcgcccaagtgattgattatcttcatcataaagcaaacccgccgatgaaggaaacgagcctgcaggagctcgtcgaagagcagacggacaagctcaaaggctgctttaaagaactcggaagcggacaatggaacgatatcagatccatcatcgccgtcacggtgctctccgttttgactttccatattcaagcctcagcctacaaaatgaccagccatttattataattcataacgcttcttcgccccggtgtctgcgccggggttttttgctgtacaacaattgccagcataatcaataccgttccgtttgaaactaaaatgcgtaaacacatcttgccagagaaaaggagatgaaaaagatggcgagcagaaataaactcttagttccaggggctgagcaggcacttgaccaatttaaatacgaagtggctcaagaattcggcgtgaaccttagctctgatacagcagcacgcgcaaacggctctgtaggcggggaaatgacaaaacgtcttgtacagcaggctcaatcacaattaaacgggaaaaatcaataatgcagcttattcgccgggacttctcggcgaattttgatatttatcggcattctcctttccgtgccggtagccgttcggattcctgcggtctgacgaatcttcatgatgccgataggagtcccaatgttcattgcgatcatgattccgctgattccagtaatgattgtaatacttttgcttaggctctttgtcatttccgttttcctgaggattttgtgttgggggctgctctgtttccccatcttgttccttctgtgtgttttcttctgatccggaagctgcatttttgtcggtttgctgactgccgtcctgactgtccggcttcgcttcttccgtgccgggcgttgtttcattgttttccggcttctctgctgccttttcttcatcaggagctgtcttttcatcagccgccggcttttctgtgtccggctgtttgctttgatcagcgtctgtttcggtatctttttgatctgtttcattgccgtcggtttgcttttcagactgtttttcttctgttttcttttcgtttcttcttatgtagctgcctgttgacatcccttcctgttttgctttttctcttgtttccatatcagattcaagagattggacctggtaggtgcccttatatttttcagtcatgtcagccagctgttttttaacgccttttttatatgtattgtcatctgtattttcataaaccgtggaaattaaaatctcttttgattcctttacatatccatgcttgctgcaatcggtaataatattattgatgacttccttaaaatcgctgcttttccaatctccgatgtcactgatgacctgtttggcgtcatggttcagcggtgtcagttcaatgacttcatatttgctgtttaaagccatttcaatgctgggattaatgtcaagcgtcatatacgcgtaagctttgttatcagaaaaaaccgggagcaaaattaaaataaacaaaataatagcagtcatcgtaaacactcccaatttaaaagggcgcagtttcagaaaatcaaaaaagctggcccttcttcccatacgcgtttcgccttcgaacgtaatttcctctccgatttcacaagtgcggtgatcattttttgtttttaaaaattgtccgtcaggggttagcaacgtgacgaattttttatttttctctactatgatccctcttctcatgagtgcaacacccctttaagataatcttttaaataaatataatcaccggtaataataatactcatggcgatgatatattttcggttccgttcaatcgtttttctgctgaccgacacaagctgctccagctgtttgacaggaagctgttttttctggtgcaaaatggacgccagctcttcattttcaacaagcgtgtaggctaccttaatcgcattctgcctcgcatcagtatgcttcggcgattgttccagcagctctttaaaagacaggccgtattctttcagctgcttctgaaaaaaaagaatttcttcccggcgctgttcctgttctatctgtttgcggtattcatcaatggaaagctccgcttcgataaggctctgcgaagattcctggtcgtcgccctcctgcacatccatattgatatgctgagcggttcttgcttcttttctgatatagtctatcacttttctttttataatcagctctgcaaatgcaagcagcgaattacctttttcagccgaatacttttcaatagcttcgttaaacgcgatcagcccgatgctgaattcgtcgtctttttcatctatatatcgtttacaaacggatgaaaccgtcttcgcgataaaaggcttatattgctgtattaaatcgttctgcagatctttgtcgcctttttgtattttttcaacagatgtttcaagcgtttgcttcttttttcccaatttaaacaaaaggctaagcactggtttcacctcagttcctccctataactactcataatcatagctaatttagtagggattcgcaaaggaagaaaaagagaaatcgatttcatttgtctcaattatgacaagccaataagacgtactatacatgatttcgtgcccccatgcagaattaagggggttttctctgtgttttttgtaacaatgctgttataaaattgttatcatatgtcttaaatgtaagcgcttcaaacaaaaaagggaacctgctttctaaaaagccagactccctttttgatcattttacgcgtgttctcttttttccgatgccgcgccggactctgtttgttttgctcctgacataaaccatccgcaaaccgcaatggcagccagaaccgcccagaaaatgattttccaggccgccgaatggatgacatctgccggaattataccgagttcctcatgggccaacgtataaagagcgagcttcacgcctacccatccgacaatcacaaatgccgccgtttcaaggcccggcctggttttcagtaaggatacgaacattgatgccgcaaaacgcataatgattaaaccgattacgccgccggctaaaataacgagaaactgaccgccgtccaagccgccgatggcaggaagccgtgttcccggaagcgttacggcaagtgcgaccgccgctaaaatggagtcaacggcaaaagcgatgtccgcgagctccactttcaagacagtctgccaaaacccgctttctttctgcgttttctgcccggcgttatctttgaatacataccgcttcagcaaatggctgaccgcaatgtaaaacaggtataaagcgccgacggcctggacctgccaaacattcaccagaaatgaaatggcgaacagcgacccgaaacgcaaaataaatgcgcccgccaatccgtaaaataaagccttcttcctttgtttttcaggaagatgcttcaccatcacagccatcaccagcgcgttatccgccgccaaaatcccttccagcccgattaaaacgagaagaacccatccatactccaataataatgcaaagtccaatccattccctccgtttcttttttctatcatccgagcttataccggcggtttttttacgcaaaaaagacctttgccgatataaggcaaaggtcttgctagacatgaatgattggcatgccaacaaagtcgatggatatgatccatgaattgacgactttgtttccggaatatccggacgctactcccctttgggatttcaagaaatatttgtttatacgctcatgataaagcctgtttcatcatttgtcaacgcttaacttttttaacaaattgagaaattttttctgttttgacccgctgttttcttctcttcaaaaacatccaaagaacgagaagcaacacaatgaatataccgagcggcagcatatattgatcgagaatggaaccgacgcttttccaattttccccgagtttcataccgaggtatacgtaagcaaatgtaatcggcagcatcgctgcatatgtatagagagagaacacccagatattcatcttcgcaatgccgcacggcaaagaaatcagcgtcctgacccccggtataaaacggccgctgaacgctaccaaacctccgtgcttctgaaagaaatcatctgatttctgcagaaattcgggttttatccatatgtactttccatatttcagcaaaaacggccgaccgcccagcctgccgatcccatataagacaagcggacctgaaacaccgccgagcgaaccggcaaacacggctccggcaagcgtcatatccccttttgagacccaatagcccgcaagcggaagaacaatttccgccgggatgaattctatactgagcgccaaaaaaattccggcgtaagataagcttttaaacgcttcaattattgatatgatgaaatcttcgatgatctatcactcccggcttacgtctatattctgaaacttaagaatgattttaacacaaaaccttgaggctgaaatatcttttagacatgcccgttataaatatagtcgtttcagatcggtatagcgggagggaatgacatgcgcaatacaacgtcccgcctgtctcctgaatgctcgtctggcggcggttacatcacttaagatctccggaaagttaccatttgcggtaagcggcgctgaccggaattcagttcatatgggcagtgcgttttgccgggatctttgccatcgccgaatctgtttttatgggagcgggaaattctctcggtcactacatggaaatgcgtgggcatttcccggggaatgattctgtataatttttttgatcaaccattgatgattttcggggacttcagcgatttaaagaacttaccgattcacatgcgatttccttttcagccggctattaccgcatgaggaaatagaatagccgctccatgaacgccgcatcacccataagttgctacacatggaacggacccgtttatccacaataaagacaaaaaggagtttttattcatgcacacgatgtggaagggttcgatcagtttcggcctcgtcaatatcccggtcaagctctttgcggccactgaagataaagatataaaattccgcagtcttcataaagaagaccatgcgccgattaaatacgaaaaaatctgcaccggatgtgaaaagagtctggagcctgatgaaatcgtgaaaggctatgagtatgtaaaagggaaatacgtcattatgacagacgaagacttgaaagacgtaaaacaggaacatgaagaaaaagcggttgagattgttgactttgtccagctgcaggaaatcgatccgatttattttaaccggtcatattatgtcgggccgggagacaacggcacaaaagcctatacacttctgcgggaagcgctgaggacgacgggtaaaatcgggattgcctccattacgatccgctctaaacagcagcttgcgattcttcgcgtgtatgacaactgcatcgtgatggaatccattcattatccggatgaggtcagaaatgccggacatgtgccgggcgttcctgagcagacagccgttaatgaaaaagagctgcagacggcgatcacattaattaatgagctgacaaccgagtttgacccggaacaatacgaagacacataccggaaagcccttctcgccaaaattaacgataagctcgaacatgaagaagcgggcgtgacacctgctcctgccggcccgcgagaagatgtcattgatcttgtcagcgcgcttcaggcaagcattgaccggacgaagcggccgaatcgcgaacaggctgcaccggcacggacaaaagacacagcgtcagctggcggcggaggcaaaaagcagaagacgaccagacaaaaagccggaacgtcttaatcatggtgctgacgatgcagccgattttgacctctgtaccgcctgaaggcagtgagtggcgctatgaggtaaaatatgacggattccgctgtcttctccgcatagacgaaaacggtgttacattaaccagcagaaacggacagacgctgacgaatcaatttccggaaatcacggcttttgcggcccggtgttttcagcacatgaaagacaggttccccattacgcttgacggagagcttgtctatttaatcaatccgtacagagcggactttgagcatcttcaaatccgcggacgtttaaaacgaaccgaagcaattaaaagcaccgctgatagacggccgtgccgctttctggcatttgatctcctcgttctggaaggcgcgggcaccgtctcattaccgtatgtgaaacggaagcgcgccctttccaatctgcttaaagaagcaaatcttcccgcctgccctcatcacttagcggaagaagcgattcaatacattccggagcacactgactttgacgcgctttgggacaaggtcgtccgccatgacggagaaggtatcgtagccaaaaggacttccagcggatgggcggaaaataaacgctctcccgactggcagaagtataaacatatgaaaacggctcacgtgctattaaccggattcaatccgaagaacgggtatgtgacggcctctgttttgaaagacggcatcgtcgtcccgatcgcttccgtttcccacggcatgcaggcggaagaaaaaaacgccgtcagaaccattatggagacccacggaaaaaaacaaaaaagcggcgagtatacacttgagccttctatctgcatgaccgtgcagtatttaaccatattgcaggacacgctgcgtgaagtatcttttgtgtcctttcagtttgaaatggattggacggaatgcacgtatcagcagcttatcctccgctctaaaacgctgccgccgaagctgcagttcacaagcctggataagatcgtttttaaaaaacgtgaaaaaacgaaagcagatttccttagttatatggtgaaaatgagcgattttctgatgccctttcttaaagatcgggccgtcacggtgatccgttatccgcacggcgcgcctggcgaatctttctttcaaaaaaacaaaccggactacacgccggactttgtcacaagcgtgtttgacgggagccacgagcacatcgtatgcagcagcgtaccgtcacttctatggctggctaatcagctggcgcttgaatttcacgttccgtttcagacagtgcattctgaaaggcccgcagaaatcgtcattgatcttgatcctccgtcaaggaatgattttcctatggcagtggaggctgcgcatgtgctgaaacagctgtttgactcattcagcatgacgtcattcccgaagctctccggaaataaaggcattcagctttacatcccgctttcaccggaagcattcacctatgaagaaacccgtgcgttcacaatgctcatcgccgattattgcgtcaggacgcgcccggatctttttacgacagagcggtttatcaaaaaccgaaacggcaggctctacctagattatttgcagcatgccgaagggaaaaccattatcgccccctattcgacccggggcaacgaattgggaacggttgcggctcccctttattggagcgaagtcaactcctctttaacacctgatgattatacgatcgatacagtagtgaaccgcgtcaggacagagggagatccgttttatgatttttaccggaatccgcaggacggcccgctttcaatcgtgcttgagcaaatcaagagaaagagctgacgcttttggtcagctcttttcagtctgatacgtgcacatcaatttttctttggaaataaataaatagcaggagtaaggaatgtttttgagggtgagctgttttgcagtaaagtataaaatcggaagatgggccgctttcttaaacagcctgtagcagccgctggacggttttatcacatcaaaaccgagtctcgccgctcctttatgaagcattgtaatgccgacgactcccttaatctcgtctttccgtttatgctggttaatataatccgctaaatgaggcatggattgatataccttctgatatagcataatcccccttctgaccgcgctttcaataggctgcagctctttcaggagtttgacattatgaagatgaatcttaactaacacgtcgttttttttaatcctggttccgtcgctcaggatgacatcttttcctttatatctagtcaaacggacgcggaatacattcgattgccgtttatcaatcagcgtcagccgggtaaagaagaaataaagcggatcaagtaagtaccatatagacagcagacagcttctcacatgttcaccttctttatattcaaagcaccctcatattttggcatgaggcatgacacattatgattggtaaataatgatgcagccctgtatcagcttatgcaaaaaccgcttcaggctctactgtccgaaacagaaaaaaacactcttcatgaagaagagtgtctgtatccgctttcttttaacggaaaagcaaatgctggctgtgaattcctgcttttttcagtaaggctatcagctgttcctgttcctcaggcataagtcctgaaaacgctctcgcaattctcaatgaatgaatcggataaattttatccaaatactcgtttcctttatcagttaaatgggcgtaaacagaccgtttgtccttcgggtcttgttctctgaccaaaaacccgtttctttcaagcttgtcgatgacataggtgacattcccgctgacaagcaaaagacgcgacccgatttgctgaagcttttgcggtcctctcgtatagagcagctccaaaacggcaaattcagtcggattaaaaccgtgttctttactatcgcggatgctgtgttcagacacactcttgaaagcccttgcaaaaactttgtacaaattcatcgaacgcatcacttcttcttcgttaaatgataatctcatcatatctaccccgtatttaagatttttataaaaaaataatgtaaacccttacaattcataagagtcgttctttgttttatattctattcgtgccgtttttcagaattccttcttttttatataaaaaaatacccttatacatcatttaatttgtataagggttccgttctttatagggaatgttccgaaaaaaatacgcgtattcctttctcagctccgtaattgtcatggaattaagtatttctttcgtatagactccgatctgcagaagctttttggaataatggtttctctctttatccaatgcattttgaagcaaacgactcatgacggcctcctttgttttccgttattctatgatcagaataacgcttttatatcaaagatgtataaagccattgtaaaacttctgtagattatgatgtttttcggtaaagaccgttctggacggctctgagcagcggaaaagcgtgttccccggcaagctgcatgaacgcctccagcatttcatcgcgtttcatatctaattcaatgatttcttttgccagcgaaaccgctttttctttctccattcctatccttcctcctcattgtatctgtacaataagcataaaacgggggcacagaaccatgcattaaccttgtcaatttttctgccgctttttttctaaaattttctattccgcgtcagaaaacctgacaagcgtcaggttttttctctttttttcttatataatatgagtaaaagacatccaggggtggaaaaatgacgacagacgaacaatcttacaaagataaaaaagtaatctcgatcggcattgtaagcgaattaaccggattgtcagtcagacagatcagatactatgaagaacggaaattaatctacccgcagcgatcatcacggggaacgagaaagtattccttcgcggacgttgagcggctgatggatattgccaacaagcgggaagacggcgtgcagacggctgagattttaaaagacatgcggaaaaaagaacaggctctcaaaaacgacccgcagctccgcaaaaaaatgctggaaggacagcttaatgctcattttaagtataaaaaccgctgatcaaaaaagtccgcctcctgtgagacggactttttttataaagcatgaagaaatgcagttgcaatgccgaaataaattaataaggacaaaatatcgttcagcgtcgtaatcagcggtcctgacgcaatcgccgggtcaatgttcagtttatgaagaataatagggacgatcgttccggccatcgtaccgataatcaacgttgcaagcagcgatgaaccgacgacaaaaccgagcgttaagtctttctgccagacggttgcgacgatcgtaatcgcgatcgcacagacgatgccgatgtagataccggttcttaattcacggaaaatcagtttaaagatggtttttttattcatttcttctttagccagtcctctgatgacgacggcaagtgactgtgtgcctgtattacccgtcgttcccgcgatcatcggcatgaaaaacgcgagggcgactactttttgcaatgtatcttcaaaataattcagaatgcttccggaaatcaatccgataaacaaaagcagaatgagccacggcaaacggcggtacgccgccacgtatgctttcgtatcaaatgtaatcgccttaccggaggctgcgaatttttcgtaatcttcatcggcttctttaatcacgacgtcaataatatcatcgacagtgacaataccgacaagcacattattttcttccacgatgggaatggctaaaaagtcataccgctggatcagccgggcgacttcttcctggtcttggagcaccccggccgagatgacacgcgtaaacatgagatcctgcactttatcgtcaggctcgccgagaattaaatctctgtaagagagcactccgacaagctgcttgctgtcattaatcacgtacaaataatttattgattctgcgatttctgcaaagcttttcagcttcacgaccgcatcttttactgtataatgctgcggaatccagacgaagcggttcgtcatcatccggcccgccgattcttgcggatagttcatcaaaagctgtacggcctttgattcctcagcctccatactggataaaagctgttctttcagttcttcatccatctcttcaagcaatgcggcgagatcgtcgttatccattttattcattgcgagagtggctttcgttttaccgaccttatgcaaaacggcaagctgaaattcccgctccagctctccgatcatgtcggtgatgtcatcaaccgtcatatatgacagatagcgggcccggtgcttttccggcatttctttaaataaaaatgccatgtcatagggctgaagctcatctatcatgtttcggaattcttttatttttccgtcccgcaataaaatgataatgcgtaatatgagttcgtcataggtcatgttttggaccatcgggactcgtacctcctttacggagacgcgccgtccgtcaagggaagtgcggcggtttgtctcctcatcatgtcgtcactggttatctggctgtatatgggtacttcttctgacatactcgaatggggagaatccatactccgcacctccttatcatgctcagtcgtgtacgttttgaggcataaaaaaaaccttccgatatgaaggcgaaaacaagcacggcaaataaacgtgcggggcctccaatcgtagagctttagcactgtatggcataggacagccatccagctgcgttaagaatcaccttatgtcgatgattcctgttgacccattggcgtctttggacatttttgggcagcagcgtatctccatacaggagcctcacctaacgaagttcttatttgaattgacacactgagattacagaaaaaaaaggaatgtgtcaaccttaaatttgtgatttcagcacatgcctataaaataaacggaataaaggcataaagcccttattccggcaaatcgctttcatcgtcttctgaaaggaaatgataggattcatgcagcatgagcgcgtattccccttcttttgtcggatgcggtacatactcagcctcgttgatatactgctcttcccttttcttcatatgacagacctccttctcaattttagattgtccaaaagaagctccgttatcataggaaagaaaaaatcacttgcggaacgggacatgcagctatatttttcggatcgtaaaaaagttcctaagcagccacgggcccggtttgaaaccgagcgttaattgccacgcgccgatcgcctgcagtccgaactcccgaacgagaaccattttttcactcatgctccgcacatcctcaaaccacacttcatgcgttcttccattttcatcagtataccggaagtaaggggaacgctcctgctgggaataacggatcattgattgatgcttcatcgccgtttccatggcgcgctgattggagatggcagatccgatcgttccgggacggtacggaatcacccaatcatacccgtacagcggaacaccgagaatcacttttcttctcggcaccctgctgatggcaaaattgatcgtttgcctgacctctgttaaaggcgccacgggtcccggctcactgccggcgtggtgccagtcgtacgccataatgaacatataatcgacgacggctccgattccgccgtaatcatatcccctcagccacggcactgcatcacttgttttcgccggaaccgatatcgttaacgcgagctgatgctctgaaagccgggtttttaactgccggagaaatcctgtgaagagatccctgtcagcttctctgacccgttcaaaatcgatatttacaccgccgtatccctttcttaccgttaaggagacgatattgttgacgagattcgttcttgccgccggattctgcagcacttgatgggctaattccggactgaatcccccttctgtcagattcgtaatgacggcaagcgggcgcactctgttctgccatgtggtttctattgcggttctgtcgtttaaatcgttcatgatatctccattcgggccgaaatgatattcaaacaaagaaatcgccgaagaatacggcgcaaaatcattaatcagctctctatccgcttcaggcgtccgaatgacataaaattgcagggttcccgcaagatagttagagatatcagggatcttcactttcatacccgtccgcagccggttcggcggaatatccgggtttgcctgcatcagctgcatctgcggcacataagccttacctgcgataacggcatacgtatcattcggctgaaccgtatattcattaagagggattaaaagcgcctgccccggaacgatattcgtttcctcaagcccgttgacgcttctgatgctgtcaacagggtatccgtactttctgctgatggaaaataacgagtctccagactgcactgtatgaacaaacatagatgtcctccgtttccttttgatcaaaagggctcttcttatctttatgaatgatcttccggtccgattccaaactctgttcggagaaaggctgtttacaaatcagacatgatcaactatgatgatgtcattataaaaaactgtataggaaacgcactaggggtgctgttatcggctgagataaaacatgcggcaggcgtgttttgatcccttataacccgatctggataataccagcgtggggaagtgcagattgaccggagcgcagggtttttccccatgcgttttcgttctgctgctgcatattccctcggatatgcagttttttatttttcattaaaaaacgggggaggacaccgcaatatgaaacttacgatcaatcgtctttcgtaaaatcaactctttcatacttacgactatcgataagaaagcaggagatcacaatgaaaaattggaaaatgagagaaattgtcgtcatgtccgtcatcagtgttgtatttgctgtcatttatttagtatcaactcatgcaagcaatatagcggcaggatttttcggccggatgagctacgaaccgatttacggtatctggtttatcgtctcggtgattgccgcgtacattattcaaaaaccgggagcggctctcgtttctgaaatcatcgccgcgtttgtggagtgcttactcggaaatccgtcaggaccgatggtgattctgatcgggatcgcacagggaatcggtgcggaagcaatctttttagcgacacgctggcgggtgtataccctgcccgtgcttcttttatccggtatggggtcttctgtgacaagcttcatttatgacttgttcgtttccggatactctgttttgaatccgggtttattagccgtcatgcttctcatccgtctggtctcaggtgcgcttcttgccggccttctcggcaaagcaatcagtgatgcgctggcttacacaggagtgctgaacggcatggcgctcggaaaacaattcaagaagaaaaagaaacaggtgaaccaagatgcaggcatctgaaccccttctatccgccggccgtcttaccttttcttatgatcaggatgaaaagccgatttttcaaaacgtgtcctttcagctccgcaaaggagagcgggctttattgctcgggccgagcggatgcggcaaaagctcgctcgctctctgtttaaacggtctgtacccggaagcatgcgatggggttcaatcgggaaccgtttctttatacggaacacctctttcacacctgacagaacccgccgccagatctatcggcgtcgtgtttcaagatccggaccagcagttttgcatgctgaccgttgaagatgaaatcgccttcggcctggaaaatttgcaatatacaaaagaagatatggacgcaatcatcgatgacgttttagaaaaattagagatcactcatctgaaaacgcgaacgatcgcttcgctgtcaggcggttcaaaacaaaaagtggcgcttgcctgtatcattgcgatggaaccggaactcattattttggacgaaccgacggcacagcttgatccatattcggcacgtgaattagtgcggctgatcaaagatcttcaagcaaaaaaaggcttcggccttctcgttatcgaacatcagcttgatcactgggcgccgtggatggacaggacgattgtccttgacgaaacgggtcagaaggtgatggacggagagacggatgttatctttgaaacaaggattgaagagctgatacagctcggcattccgattccgcgtgtgatctcattgcaggagcacgtcagcattccttttacattgtgtaaagaaaatctgtttcacgaacctgtaccatctctgcccgaaccccggcccgccgcgctttcggcagaagacgcgctgagcgttcacgaactgtcattctcaagaggagcagaagtcatttttcaggatgtgagcttttccgtaaaaaaaggttcaatcaccgcgattgccggtcctaacggaacaggaaaatccacgctcctttctgccgcggccaagctcatccgtccgctgggcggagacatcaaaatagacggcagaccgattgattcctattctgaaaaagagctgcggcgacagatcggatatgttttccagaatcctgaacaccagtttgtcacagattccgtcattcaagagctgatgttcggttttgaaagcaacagagccgcaaaggagaaagctcttcagctgttaacccgattcggcatgagacgccatgcctcacagcatccgttttctttaagccaaggacaaaaacgcaggctcagcgtcgcgacgatgcttatgcacaatgtgaacgttttgatgcttgatgaaccgactttcggacaggatgccaaaacggcgcgggagtgtatgcaaatgctccgtgagattcaaaaggaaggaacggctgttttgatggtgacacacgatatggaactcgtctcggattatgccgacacgatccttgtgctctgcggcacgaagctggtgtaccgcggaacgcccgactcattgttttctgatcatatcggaatcgcggagcgggcgcatttagctttgcccctgcggtatgaatggatgaaacacgacaggaggcggaaaaatgaacttgcggctggaggctgttaacccgtcaataaaggcggcggctgtattgttatgcgtcattatgctgtcatttatttataatccgtacacccctgctttgttttatatcatcattgcgggaggcgtcctctcggcggggcgtgtgccgctgaaaaaatggctgctgttcacgattccgtttgtcattctggccttcggttctttatggacagccgccgtattcggaaacgtcccgacaaccgggagcaatctgctgtttaaactcgggccgattgccgtcaacagtgataacgcggcgctcgggatttctatcgcgtttcgtattttatgtttttccgctttgtcgatgatgtttctttttacaaccgatccgattctgttcatgctcagtctgattcagcagtgtaagctgccgcccaagcttgcatacggcgttatcgcgggattccggtttctccctcttctgaaagatgaaatcctgatcatccggcaggcgcacagaatcaggggtgcggcgtctgattccgggctgaaaggaaagctctccgccttcaggcgcttcaccattccgctattggcaggcgcaatcagaaaggcggaacgcacggccatcgcgatggaatctaaaggctttactgggagccgaaaccgcacgttttacagaactgttactgtgcgccgcgccgactggtgctttttcctgctcgtgcttctgttattcggcgcaagctggctcatttcattgttgtttgtataaaaacaggccgccggagtgattcggcagcctgttttgttatgtatgttattgatgataattgagagcctgagcgagattggacttgaccgtaatctctgagaaattaatgccgagctgtacggcggtttgagcaatttccggcctgattccggataaagtggacgtgacgccgatcaatttcagcgcttcaattaatttaaaaatctgatgcgccaccatcgtatcgacaaccactacacccgacaggtcaattaacagatgttcaatcagccgttttgcacatgtgctcagcgtattttcaagaatgaatttggcgcgctccgtgtcaatatcgccgacaagcggcagcagcgccgtccgtttgctcagcgtgataaccggcgagcttaactccaaaatcatttctctttgcgcattcagctgcatttttgagttatgctcagcatgatcgacaaacgtgtaaatcgtaaaatcaaatacttgtgcaattaaattctcccatttcttcctttctccctcggcaaacgaagattcatgtttatcggcaaacgcatcataataactgatgtatagtctccggtttctcatgaattcacggaccacatactggacgggagtatccagatgcttctggtctttcgcaagctcaatcacccaccgctcgaattcttctaaaaattctttttccggcatgatatacattttattaatatgccggtaaaattctttatcctgctccgtcagttcttctgtgatgacgggatttgtcaaagaataaatcgaattcggatccgaatcttccatcgtttcgatccactctttcgcaatttgatccacttgttctgaaaaatagctgtataacgcttcatttatcttcatctctcttctcctttcccatttccaattatagcgtcagcgggtcatgaatgaaaatgaaagctgtcaaactatccatttatttgaaattttttagtccgatagattacgccttttttatgaaaatgcttcaaatgactctttccggccggcatgctctgccataaaatagtagcaacacccttgtatccactggcaagcataaaaaaggagggcttttttatgaatggtgaaatgcatttgattccttatgtcacggatgaacagatcatggatgtgaacgagcttcctgaggggattaaagtgattaaggcgccagagttgtgggcaaaagggtttaaaggcaaggatattaaaatcgcggtccttgacacaggctgcgacatcaatcatcctgatttgaaagaccggattgtcggcgggaaaaacttcaccgatgatgacggaggcaaagaagacgtgatttccgattacaacggacacgggacacacgtttccggaacgattgcagccaatgattcaaacggcggaatttcgggtgtcgcgccggaagcaagccttttaatcgttaaagttctcggcgggaaaaacggcagcggcaaatacgaatggatcattaacggcatcaactacgccgttgaacaaaaggcggacattatttccatgtcactcggcgggccaagcgatgtgcctgaactgaaagaagcggtcacaaatgcggtaaaaagcggtgttctggtcgtttgcgcggcaggaaacgaaggcgacggagacgagcgtacagaggaactgtcgtatccggccgcttacaacgaagtgatcgcagtcggatcagtctcaatcgcccgtaaatcgtctgaattttcaaacgctaataaagagattgacctggtggctccgggagaaaatattctctccacccttcccaaccataaatacgggaagctgacgggcacttcaatggccgccccgcatgtgagcggtgcgcttgccttaataaaagggcttgaacaggacgcgtttcagcggacgctttctgaggctgaagtctacgcccagctcgtgcggcggacccttcctttggacatcgccaaaacattggccgggaacggatttctgtatttagacgcgcctgaagtgctgatggaaagagccgaacaggcacagctgctgtctttctgatatttttctcgtataatgattgatcagtttgtcacatcaccaatttttaaattgtgagattttctattgacagtgatctgaataagctgataagataaccaacaaatgatgtaacttttcaaaaaaattgaaatactttctcttatcgagagttgggcgagggattggccttttgaccccaacagcaaccgaccgtaattccattgtgaaatggggcgcgtgatttttgcgccgagacgattgtctcataaggcacggtgctaattccatcagacgtgatctgagagataagagaggcttgcattttgaagttaaagcctctttctctcatgagaaagaggcttttttgttacatctcacttaaaggaggagacttaatgacaacaatcaaaacttcgaacctcggttttccgagaatcggcttgaacagagaatggaaaaaagcacttgaggcttattggaaaggaaacactgataaagaaacgtttcttaaagagcttgacggtttattcttatcagctgtcaaaacacagcttgaccaacatatcgatatcgtgccggtctctgatttcactcattatgatcatgtgcttgataccgccgtcagctttaactggattccggaaagattccgcagcatcacggatcccgttgatacatactttgcgattgcccgcggtgtaaaagacgccgtttccagtgaaatgacgaaatggttcaataccaactaccattacatcgttcctgaatatgacgaaagcattgaattccgtctgacgagaaacaaacagcttgacgactaccgccggatcaaagaagaattcggagcggaaacgaaacctgtcatcgtcggtccgtatacattcgtcacgcttgcgaaaggatacgaagaatcagaagcgaaagcgattcaaaaacgccttgttcctctttatgtgcagctgctgaaagagcttgaagcagaaggcgtcaaatgggttcagattgatgagcctgcccttgtgacagcttcttctgaagatgtccgcgccgcaaaagacctctatgaatctattacaaaagagctttcaggactgaatgtcctcctgcagacatactttgattcagttgatgcatatgaagaactcgtttcttatcccgtacagggaatcggacttgatttcgtgcatgataaaggcagaaaccttgagcaattgaaaaagcacggcttcccgaaagataaagtgctggcagccggtgtggtcgacggccggaacatttggaaaatcgatgtagaagaacgccttgatgcggctttggatatcctcagccacgctgatgttgaggagttatggattcagccttcaagcagccttctgcacgtgccggtggcgaaacaccctgacgagcatcttgaaaaggatttgctgaacggcctgtcatacgctaaagaaaaactggcggaactcggcgtcttaaaagaagggcttctgtccggcaaagcggccgtcagtgagcagatcgaagaatcaaaatcggcacttaaggctttaaaagcattcgcaacaggagcgaactccgctcaaaaagaagagctgaatcagctgacggaaaaagatttctcccgtccggcaagctttgaagaacgattggcgctgcagaatgaatcactcggtcttccccttctgccgacgacgacaatcggaagcttccctcaatctgccgaggtgcggagcgcacggcaaaaatggcggaaaaaagattggacggatgaacagtaccaagcctttattaatgcggaaacgaagcgctgggttgacattcaggaagaaatcggcttagacgtgctcgttcacggagaatttgagcggacggacatggtggaatacttcggtgaaaagctggccggattcgcctttacgaaatatgcatgggtccagtcttacggttcacgctgcgtacgtccgcctgtcattttcggagatgtcgaatttatcgaaccgatgacggtaaaagatacggtctacgcccaatcgctgacggaaaaacatatgaaaggcatgctgacgggacctgtcaccatcttaaactggtcattcccgcgtgtggatatttcaagaaaagaaatcgccttccagatcgggcttgccctcagaaaagaagtaaaagcgcttgaagatgccggtattcagattatccaagtggatgaacccgcgctccgcgaaggactgccgttaaaaacgcaggattgggatgaatatttaacttgggccgcagaagcattccggttaacgacgtcttctgtgcaaaatgagacgcagattcatacgcatatgtgttacagcaactttgaagatatcgtagatacgatcaatgatcttgacgcggatgtcattacaatcgaacacagcagaagccacggaggatttttagagtacctgaaagaacatccttacgtgaaaggcctcggactcggtgtatacgacattcacagcccgcgtgtgccggcaactgaagaaatctatcaaattattgatgacgcgcttgaggtgtgtccgactgaccgcttctgggtaaacccggactgcggactgaaaacaagacagcaggaagaaaccgttgcggcattaaaaaatatggtcgacgccgcgaaacaggcacgaaaaaaacaagctcagcttgtataatgaaaacagccatccgtaaattgcgggtggctgttttttctgggcatgctacttattctgcagcgcttctgccagttcatacaatgaatcatactgcttaatttgatagccccgcccctctttttgcaaataccctttttggcagaattgcgtcagcacatgcaagagatgacggtaagatacacccaaataatcacagaccgttacgtgcttctctttataaacccctttataagccgtctgcaaaataaaatcagcaagccggttttcaagcgggaacgccagactttgtgaatatttcgaagccataagcgttgccttagcacttaaaaacttagccagctcacgcaggaatttcgcatcctgcagcaattgcacgcggcagcggtaaataggcagaacaaaacaaacagtcttcgctgaggcttgaattccttttgtgtaatacacttcatgtaatagttccatctctccgatgtaatcatttttgttgataaaattaattaaagaaactttcccgttttggtgggttacatatattttcgcttttccttcaatcacgtaaaacaggaagtctggcctcctgccctcttgaataatccattcgtcccgctcatattcgcgcacttccataaactcttcagcggggaaagagaataaatgcgcgattgagtgtttttctaactgatgccgctttttctcgcctttataaatttccatcgtccaccccaaaaatatgagatatctcatattgtctttatgtccttacatgataacatgccaattaaaggaggaacgggaatgaaagcatatcgctggatgagtctgcatttttttagtttttttatgacatggggtgtttttctgccctattggacgggatggatggtgcatataaaaggggtttccgtatccgaagccagtttcattatgagtctgggcctggcggcaagagggatttccacattatttttcttcccttatttatcaggaaaattcagcagcaaagccttattaaacggcgccagaatcgggacgcttctcgcacttttatgttatattccggctgattcttttcaaagcctgcttcttgtcacattagtgctgcatgtgttttacccggctttaatgcctgctttagacagcgcttgcggcgtccttgtacagcataacgaattaaaggcttatgggactagccgacagtggggatccgcgggttttgtttcagccggcgtcatcctgtccgtctttacaggtatattcggagatcaagcgattttatgggcactgcttttgggcgccctgatattcgcatccctaagctttatgcatgcgccagctgttctttcaaaacggccggaaacagaccgtgcaagaaaagagggcatgtttgccttattccgcatcaaatatttcggtctggtgctcgcaatcgttatcttactgcaggcggcacatgcatcttactacaattacggttatctctttttgcaggaaatcgatgcgcccgcatatgccatcggaatcatcatcaacatcgccgttatcacggagattatcttctttgcaatcgctgaccgatactttcatcaatttacggcaggctctttgctcgccctggcggcgcttggtgctaccgtacgctggatactcgtatttgcctttccgcatgtcatcattttctgtcttgcgcagacgctgcatgcctgttcattcgcgatgggacactatgcatttatgaaatacttaattaaaaatatttcacccgcgcaaatcccgaaagcccaaggtatatattcagcgcttgctctcagctggagcactgcggtatttactattttcggaggttttttatatgaaattgaaccccggtatgcctttatcggaatgattgtttgtacgataccgtccatgcttctcgcccttttatacagaaaacttgaaatgaaaaagagcgtttttgcaggaaacgcacaagatatatagccatcgctttatagacgatcacatgtcccgctgtcattttgaccgattttgtgaatgctgtgcgatgtattttctctatatttaaagtatttccttcatatatgatgaaattaatgaagggaattcgttcagaaacttggacagaatcagtgaatataatgatacagtactgcttacgctcatttgggggaactttgttcgcaataaaatgattttcagccaactcataaggagggacattgtgtcacagcctaatatgcccaatatcacccctgtcgttacactttccagagacgataccattaaccttcttctttcgtcaattgctatggaagagctgggaatggcacatattctgaatgcggaaggggaaaaaatccaatacgcgctcggaacgattcccggattaacaggacccccgtcaagtcttgcggatattcttaacctgaatgagagcgtccgggatacgcttgacagcttaatgaaacaggagctccttctcggttcaaaattggacagtatctcaaatatccctacattggcgggaccgacgggggccacggggccgacgggggccacgggtgcgggtcttcaagggattgttgcttttaatccgctgatcgcccctacttacacgaccggacaggttgtcttgtataacggcagctcttatgtcgcaaacgtaaacagcccgtcgggaacccctgaaacctcagctgactatacacttttagctgcggcgggaagcaccggcgctactggttcaaccgggcggaccggaattaccggggctactggcggcactggatcaactggaattaccggcgttacaggaccgaccggagttaccggggctaccggcattacagggcctccgggaagcaccggaacaagtctgacagccacttccggctatgcgagcaatacgggcggcggtgttgtcgcagttattaacggcggcacggccatttccttaccgaatgaacaaaacctctcagcggatattaccgctaatgccgcaaatactgtattcaccgttgctccggcaggacggtactatatttcctaccatattaatttaacggccggcctgctagtaagttcgcgcatcttaatcaacggcactccggctgcaagttcgattattgctccggtcgcgtctttggcaaacttcaataactcctttattgtgactttgacagcaggcagcaccattcagctccagctgttcggattattgggtgcggccacattgcttagaggaagtgccggcgcagctttaaacattattcgattatcttaatggaacatgcaaaaaaaggatcaggcgtttgtccgctgatccttttttaattgagacagaagttcttgcgcgggtttaaattgcggattgaatttcacggattttttggcgtaagcgatggccgtcatatcatggtttaatgcagcatggcatttcgccatataataaaaagctctgaaatcggcggcaccttttaaaatgaagtgatcagcgttttctccttcaacctgcgttccggcttcaaatgctttgattgccgctctgtacttttccaaatgatataatacaaggcctttataataatgaagattgctgtaatcaggataaagcttgagcactttttcaatcccttgttcggcttcttcatatcgcttgagctcaagcaatattgtatattttagaaaatacagaagagacggaggcattcgtttctcacttaaaaattgaaatattgagccgttgacaagatgtaatgctttttcatagtcttttattctgtaacattcacttgccagatgatagactagccacggatcaggattttcctctgaaagttcttcatttaatatgctgatattccgtttatgtttttgtttgattttttcttcctgctccaagtagccgtagtgatgaatcacacatgggagcgtgaaaaaagcattgttttcttcctcattgggagccgagatattctcgtgaattctgccttgatacagaaggcctttatgattgcggaacagcctcggctgcatgctttcaaacgcttcgttttcatcgagctgcttccccgtataattgatgattttcaaaagtccccggctcggtaatccgtcatgaagcagagaagttaaaaaacggcccgtctcctgatcgagctcttcatccgcgtcaagcactaaaatccaatccccttcggcatgctgcagggcgtaatttctggcctttgcgaaatcattctcccattcgaaatcaaacactcttgcctgaaagcttttacatatatcttttgtattatcttgtgatccggtgtctgcgatgacgatctcatcagcgatgtcttgtacacttgataaacaacgggagatatatctctcctcgtttttcacaatcatgcaaagagtcagtttacattcagcatttccgctcattttctcacctttcccgattttggagttgttgattgaaccaaggccgtccaggagtgccgttcatcgttatgatgacaggccgcacccatctgacggcaggttcggcagttgattctgcatcccattcctgaagctgcctgacagcccgcttcgtaatgggatgcgcccggaattcgcgcgggctttcacaaatgaattttttcgttcgttccgtcactgtcttcatttcatgaaagtgccgcgcatacatctgcttctgttcttcttccaagctgatcattaaaaacagccggccgcccgtttccatctgccagcggcacaatgcggagaacagcctgatttcttctttgtaatttgaaccccttcttttatccacggtcacagataatatatttaacagcgccatcgtgagacaatgcaaggcttcaaaagatgtctgtttcgcttttgagatgctcggatacggcatatgcttcacccgtctctttttttatgaacgctccccgccttttttcttccaatcgcagtcctcacaatccccgcactcacagcagccaatacggccgtaaaacaggtcgtcacacggatcttccggatcactgggatcgtccggattccacgggtcatcaggatcgcccggatcactcggattacttgggtcgtccggattccacgggtcatcaggatcaccgggatcactcggattacttgggtcgtccggattccacgggtcatcaggatcgcctggatcactcggattacttggatcgtccgggtctatacaggcttcagcatcctgtaagtagataatgtcttcaagcttcgtctgcaaaaggagttgtgatttcatgacggtgcgcaggagccgttcagtgcttctattgattgatgataattcccctaaggagggatcgccggaagcgctgagaaacatttgaatcctttccgcttccgcctgcagaatatgggatagtccgatttcttccatagccacggatgaaagaaggaggttcagggtctcacatctggagagtgtaatgtcgggggtgatgttcggtatgtttggaagagtcatcgatttctccctcttttctcttggtgtcattatgcaaaagtgctatatcgtattcttattccgggagagaagagatcattactgatgttttcgttaataaaatatcccggatatgaaatccgggatattcgttcgtttctttatttcaattcaagtttgacgtctacatttcctcttgttgcttttgaatacggacagaactcgtgagcggcgtgcaccagcttctccgccgtttctttatcaagatcttttgtatcaatgacgagcgttacgccgattttgtaacccccgtcactctcatcttttaaaaggctgacctgtccttcaatttcagaggtcatgtcgattttttgtttttgggcggcgagttcaagcgctcccccgaagcaggcagcatatcctgccgcaaagagctgttcagggtttgtgccggtttctccgtctttttttgcattcggcatgatgatgtcaaaatccagcaccccgtcttcggatttaatatgtcctgctcgtccgccgactgcggtcgcttttgaagtaaataatgccattattatcagcctcctcattgtacttactgtatatattgcccctgctcatatttttaaacatgattgcaataggaaatgggccgtttttcggctacaataggggtaacgttaacaaaaaagagttggtgaaagaatggcagaaaaagattttgaacatatgaaactggagaatcagctttgttttttgctgtacgcaagctcaagggaaatgacgaaacggtacaaaccgctgcttgataagctcaacgtaacttatccccagtatttggcgctgcttttattatgggagcacgaagaactgaatgtgaaacggatgggtgagcttttgcacctggattccggaacgctgacaccgatgctgaaacggatggagcagcacggaatcatcatgagaaagcggtcggctgaagacgagcgatccgtgacgatcaggctcacagatgaaggacgggccttgcagaatacagcggcagatatccccattgccatgctggaacagacgggactgtcaaaagaggaattaaagcaggtaaaacagtcgctttatgaggttttgaaaacgctgcacggcaaaaaataaggatgccccgaatgggcatccttatttttattctgctgccagaagcttcacttcaatatttcccgctgtcgcttttgaatacgggcacacaccgtgcgctttttggataagggcttcaagctcctgtttctcaatgccggatgctttgacctcaagggtaacgccgagtttatatccttggtcgctttcatctttcagcagactgacatgcgcagtgacctctgtttcaatactcagacgctcttttcttgctacgagttgaagagcgctgtcaaagcaggctgaatatcctgcggcaaacagctgttcagggtttgtggcttgttcgagcttttttgctcttggcgttcccggcatggcaacatcaagattcagcaccccgtcagaagacgtgactttcccttcacgtccgcctgcggctgaaacggttgcagtaaataatggttttgtcatataaattcacctctattatattgtgtacaatttaattttacgaaatataatggaaaccgtcaatctttccgcataaaaaaagcttaccctttttgaaggataagcttaaaagattatacccggatttgtccgtttcctttgatgatgatttttgtagatgttaacgccggaagtcccatcggccctctcgcgtgaagcttttgcgtgctgatgccgatctcggctccgtatccgaattcaaaaccgtccgtaaaccgggttgaagcattatgatacacggcggcggcgtcaacggcggtctggaagtaagccgcatgctcggcgttctccgtcagaatggcttctgaatggtttgtgccgtactgctgaatgtggcggaccgcctcctgtacgtcctgcaccgtttttacactgagaataggcgccaggtactccgctccccaatcggcttcttctgcttgtttcgcttgaggctccagtccgcaaatcacctggtctcctcggagctccacccctttttctgtcagctgattcagcagctttcgtccgtgttcttcggcccatttttcatgaatcagaagagattcaatcgcattgcagaccgaaggacgctgtgttttggcgttgatgacgacctcgcttgccataaggggatctgctgactcatctatgtacacgtggcaattgcccgctccggtttctaaaacgggtacggttgattccctgaccacaagatcaattaaatttttaccgccgcgcgggatcaatacatccagcccatcatttaatgtaaagagctgtttggcggtttctttgcttgtatcttcgatgagctgaacggcatcaatcggaagctttgacagcccaagtgcgcgtttcatcacactgacaagcgctatgttgctgtggatggcggaagaacttcctctgagcacaaccgcgtttccggttttcagacagagtgtggccgcgtctacggtaacgttcggtctggcctcatagatcatgcccactactccgaggggcacgcggatcttttcaattgataatccattctcttttttaatggtctccaatgattcaccgacgggatcttcaagaccgattagcagttccacggcgtccgcgatatcgagcaggcgtttttcatcaagcgtcagcctgtcaataatgtcaggtgtcaatcctctgttccgtcccgcttcaatatctttctgattctctgttaaaatcagctgccgttcatttctgagtccgtctgcaatacattggagcgcttcgtttttttcagccgtcgttttcatgaccatttcggcagccgcttcttttgccaaagccgctttttgcaatacttcactcatttgtgttcccccttgtcaaataaattcacccaatcatctctgtgaatcacttccacctgcttcgttcctgaaagctggtcgctccgcttccctttggcttctaaaatttcatcggatgagtactgtgtctgccctttgccgataatgccgccgggccctctgacttccactacggctcctttcggaaaactgccgcagacatcggcgacgccggccgggaggagacttgacccgttatggatcatcgcctgctccgctcccccatcaatgatgatttcccctgatatcggagaatgaaacatgatccattgccgtgtattattcactgaggacaggtctttatcgccgatataagtgccgtcgccttttccgtttaaaatcaccatcagtttttcacgtccggagccggttccgataaacaccttcaccccgagcgacaatgcggtctgggcggcgagaagttttgacttcatgcctccggtgccgacctttgagcctgctgacccggcatatccgagcaattcaggtgtgatgtcattcagatagtcaaaccgctttgcgtccgggttttcattcggattggcatcgtacagcccgttaatgtctgtgagaatcattaattggtctgcatgaatcaaaccgcttacaagcgccgacagcatgtcgttatcaccgaacgtcagctcttcgactgatgtggaatcattctcattaataatcggcacgacgccgcgctccaacagttccattacagtggcataggcatttctgtaccgctctctttttgagaaatcatttcttgttaataaaatttgtgccggcgtcagaccgtatccttttaaatggtccatatattgctgcattaaaagcgtctggccgactgcggcagctgcctgttttccttttatcgtaacgggtcgcgacggatagccgagagcggaaaaacccgctgccaccgcgcctgaggtaatgaggatcacttcatgcccgttttcttttaataaagaaatggcttccgtatgttccttgatttttgcttcatcaatacttccgttactgttggtgagcgagctgctcccgattttcacaacaattctttgttttttcatcgtttctcctccgtggcaatcaatccaaaccggctctcgtcaataaaaaaagcccattccgtcctgaaaaataaggacgaaatgggctttccgtggtaccaccttgtttgaacgcgtttttcacgcgtcccgctttcctgtaacgccaggtatcgcgcctgagttttcccctcaggactccaaggcaggttcggcaggtttcatgcggcaaaatgtttcagcgggccattttgctctctgtcacagaaagttctgcgtactgatcctcttcaacgctcaatgatttttttatattatgcaaagaaaacaggttcttgtcaagacattttcatccataaaaaacagcccgcctccccggcggaccgtcattaattaaatacgatcgttttgtttccgtgaacgatgacacggtcttccagatgccattttacggctcttgccaacacgctccgctcaatcgttctgccgatattcttcagatcctctgcgtgatctctgtgatcgacgcgttcaatatcctgttcaataatcggcccttcgtcaagatcgtccgtcacatagtgagaggtcgcgccgattaatttcactccgcgctcataagcccgtttatacggattagcgccgataaaggccggcagaaatgaatggtggatgttaataatccgattcggatgggcagatacaaaatcagacgtcaaaatctgcatgtagcgggcaagaacgatcacatcaatcttatactgctccagcagctcaagctggcgccgctcaacttcggcgcggatatctttgttagctttcatgtaatggaatggaatattcagcggctcgaccacttctttcgcctcttcatggttgctgatgacgaccgcaatttcggccatcatattgccgctttgccattcccaaatcagttcatgaaggcagtgcagctctttggatacaaagatcgccactcgcttcagctcacttgccagagagaggctccatgtcatgccgaatgtctgggcgattgaggcgaacgcctgctgtaaatcctcttttttctcacgaatgcccttgcagtcgaattcgatcctgagaaaaaaacgtccgccttcagggtcagtcgtatattgatttgattcaataatatttgcgccgtgttcaaacaaaaacgcggaaacagccgatacaattcccggctgatcggggcagctgacaagcaggcgccctttttcctcattaccgcggcggtattctttcagccgctgtgtcatatatgaattcatctgttttaatccctcgtatcttcataattcgtaacttattatagattatactgaaaatttgataaaaatcaatttacgaaagaattttcagccctacggctgcgcacaaaataagcgcaatgaaaaagatgcgcttcgcatccttctgctcgccgtagaaaagaatgccggctagtgcgccgcccgccgtgccgataccggtccagatcgcataggccgtgcccatcgcaatcgtctccatcgcataagaaagcagggaaaaagaagccgcaaatccgacgataatgaaaaaaatccacttgactttcttttctttttgaaattgattcattaaaatgaccccgagcatttcacaaagacccgcggctatcaggctgatccaatgcattacgccttctcctccttcgtctcaggcttatcctgtgtgaccagctttaatccgatgacaccgatcagcaaaacgccgatcagcacgatttttaccggatcggcctgttctttgaaaagcaggatttcactgagcacggtgcccgctgtcccgagtccggtaaagaccgcatataccgttcctacgggcaggctgtccgtcgccttgattaatagataaaaactgatgatgattcccgtaatcgtgccgccccacgtcagtgccgaatcagcatgtttcaggccggtgacccataccacttcaaatacggccgctatgaccactaaaccccatttcatgttcttcatcctttctgtttccgggcaatacaaaaagcccggaatagtcgtctcacatgagattgactctcccgggcttttttccctccgtgtgcatatgcgggatatgtccgcatatgtgttttctctcggaccaggccatgtatgaacatgcggaaccctagaaaacatgtctgttcgtatcatactacatttcgccgaaacgttcaacgtcagatgtgatgtcaaataccgtcagccgcctctcccatttggtaacggtctcaccgggcaccatgccgattttttccgcgacgcggacggaggcagcattttccggatcaatcagcgccgctatgcgtccgtattgctgcgtatgaaaaccgtagtccagacaggcgttcgccgcctctgtcgcatagccgcagccccagcggcagcgggcaaacatatagccgatttccatcaaagtgtttccgcttatcgtctgcggaacgattccgcattgaccgagaaatgcacccgacactttatcctctgcgatccaaagactgacgccgtatcctgcggccaatcgtttgttccaggcaatccattccttcgtttcccgtctgcttttaagagaaggataatatttcatgacctctctgtcggtaaacagcccgtacaaattgtcttcatcgtcatcccgcatagtccgcagacggatacgcccggttgtcaggatggtgccggaagacttatgtttcatcatgcacgccacgtctcctttccctgtaataaattatggacccggcaggaaaagtcctttttcagcataaaaaaaccgcttttaaaaaaagcggtttgacgattaccaaggtttatctgttccgagcgcctcggccagggccttgctgtgttttaagcggttttttcgttctccggcgcgctgaacggccgtattgtgaagcatgatttcttcctcggtttccggcacgatccgcggaacgggcaccgatttcccgtttgaatcgagcgcgacgaatgtcagaaacgacgttgccgcaagctcgcgttcacccgtcatcagatgttctttaatgactttgacaaacacctccatagacgatgtgccgacccatgtgacgtaggattcaagacatacggaatcctgttggccgatcgggcgcaaaaaatccacagaatccattgaggccgtgactgtttcacaccggcagtggcgggccgcggaaattgaagcgatatcatcaatatagctcatcagctttccgccaaacagcgtattgtgattattcgtatcaagcggaaaaaccctgcttgtcttgacaacccttgtttctttgcaaaatcttgattctggcaacttcatattatttaaactcccctttggtgtctggtcgttttgacatttcatctgtaccctattaaacaatactttgatcgttttgtctaaaattttaaatattaagttggttagatattctatcagaaatgtttcattatttatcacatccgggaataataaacgcacattgaataccgataggaggatatcacatggacgtatccatacccaaatccacgcggaaaccggcttgccgcagtgagtttgatgctttgcagacagtcatcttatgccggccggaacacatgaccatcaaggatattattaacggaacgcagaaacatttcaaacaagaaaatattaacatacccgttgccctcaaacagcatagtgagtttattgacattttaagatctcatcagattgaagtcgtcctgctgcctgccgatcccgctttgcctgagcaggtattcacccgggatatcggatttgtcttaggcgagacagcgtttatttcaaacatggcggcttcagtccggcagggagaagaaaaagtgtttcaagacctgcttgacgataagaaaatcccttatacgcgactgaaaaaagcgaacattgaaggcggcgacatcttgatcgcagacggcaccgtttacgccgggctgagcaagcgtacggataaagcggctgtccgggagctgcgggaggcgctgccggagatgactgttgtgccgatccctctcaaggaggatttcttacatttggactgtgtatttaatatgatctcggaaacggaagcgctatactgtaaaaatggcttgcggcagaaagaaattgatcttctcgccgaacgttttgagatgatagaagtgcctgaagaagagcaattcacgctcggcccgaatatcctgtcaatcggcaatcagacaattatcagcctgccgcagcaccgtcatacgaaccgcgagctcagaaaaaggggttatacggtcattgaaaccgagttttccgaaattatcaaatcaggcggttccttccgctgctgcaccttgccgcttgccagaacatcttaaacatttacaaggcagtttccttcaagatacgttaatatagagaagacaagactctaaagggggaaaccgaatggctaagtacataggatacgcgggaacatatacaaaaggcggaagcgaaggcatttattgttttgaacttgatacagaagcgaaaaggctcagccggccgaagctggcagcaaagctcggcaacccgacatacgtcactccgaattctgataacagcatgctgtattccattgaaaaagcagacggaaaaggcggcgtcgcagcctatcagattcatcagaacagcggggaattaacgtttgtaaaccaccagctgattgaaggcccgtctccatgccacgtcagcattgatgataaacatgaatatgtgttaaccgctaattaccacagcggaaaagtgcacgcctttcccgtcaatgaggacggaagtctgcaggagccggctgccgaagccgctcatacgggaacaggtcctcatgaaagacaagagaaaccgcatacccatttcgctggctatacacctgagcataactacattgcagccgtcgatttagggacggatacgctgtatacgtaccaaatgaaaaacggttcgctcacagaggtgaaaactcactctttcgcaccgggttcagggccgcgccacatcgttttccatccggcggaaaaatacgcctatgtcatgacggaaatcagcaatgaagtcatcgcgcttgaatacaacccgaccttaggtgaattcagagagctgcaggtcatttccgctttgcctgaaggctttacggacaaatcgcaaggcagcgcaatccgcatatctaaagacggcagatttctttatgccgccaaccgcggacatgacagcatcgccatctttaagatcaaccaatattccggtgaattgtctcttattgaatgggtgccgacagaaggcaactggccgcgtgatttcgcgtttgacccttccgagacattccttgtcgcgtcaaacgaagaaacgggaaatctggttttgtttgaacgtgatccggaaacaggcaaattgactctgcttcaatccgacattccggttccgtatccggtctgcgtgtcatttctgcatcagatttaatcaaaaagaaagctgactttatattgtcagctttcttttttgtataaatggcaggcgacaaaacgccccgccttcacttcttcaagctcaggcgttatcttaccgcagagctccatcgcttcagggcaccgcgtcctgaatacacagccgctcggcgggttaagggggctcggcagctcccctttcagaataatccgttcacgcttgtcctcaagaagcggatcaggaatcgggattgaggataaaagcgccttcgtataagggtgaagcggttcccggtaaagcgcagcgctttctgtaatttccatcatgcggcccaaatacatcacgccgatccggtcgctgatatgcttgaccattgataaatcgtgggcgataaataaaaatgtcagccctttctctttctgaagcctttttaataggttgacgacctgagcctgtaccgacacatccagcgcggaaatcggctcatccgccacgataaattcgggatgcagagagagcgctctggcaatcccgattctttgcctctgtccgccgctgaattcgtggggataccggctgccgaaatccggatggagcccgacagcttcaagcagttcatccgccatcatcatacgggcttttcttgtattgtaaagattgtggatttccatcggctccataataatttcccttacggtcagacgcggatttaacgaggcgtaagggtcttggaaaatcatctgcagcttgcggaagaagaccgaccgctgttcggccgcggcacggtgtatatccgtcccttcatatgataccgaaccggccgtcgggtcatacagacggagaataactcttccgagcgtcgatttaccgcatcccgattctccgacaagtccgaatgtttcccctcttttaatgtgaaagctgacaccgtcgactgcttttacggctttctttcttcctgcgtcaaaatgcattttcagcccgctgacttcaaggagcggagatgccgtcattttctattcccccttttcgcttatacagcggcgtacggtgcataattctttttcatagatcgttccttccaaggacagcacttcgattgtttttcccgttttcggggagtgcagcattcggccgtctcccagcgccaaaccgacatggtgaatcgcgccttttccttcttcataggcgaaaaacaaaaggtcagccggccggatatcgtttaccgccgcgccgcacccggcttttgcttggtcctttgcatcacggggaagggtatagccgtttgctttaaatatcgaatacataaacccggaacagtcaaacccgaaaccgctcagtcctccccataagtacggaagcccgagaaacatcatgcccgtttcgatgacctcggccgcccgtccttccgtatgccggcactcgtctgcgtcagcttcatttacgaaccgttctccgagaggcgtcacaacccgaaaaaagcctttctcacgtcctgatgccggaagacgcgttaagaaacttacttccaagtccggttcgccgttagtgtgatataaaaaagctgtcggtttggtaatccatacggcgggcgaagatgaaaaaaagccgtcttttgaaagctggcttttttttatccagcccggatatccgcgcgcatccttgtttgagggctggccgggaacggcgacaaaagcccattccccttcctctttgagaatgatcacctcttccccgaaaagcgcttgcgtttggacaaggttgtctgtgcataattgcagccgctcttcatatcccatagacgctaaccattttctgatctgcggcgggttttcaagcatcggcgcatcatacgaacggggagatgacggcatcgtccatacgttggctgccgccgctgtaacggctgctctcatcttttcgcctcctcttgtttcgacaccccggtaatgccgagacccggttcatcgggaatcgtaatctgactgccgctgtatgtgatgccgcctttaatcaaatcatctttcagcataagcggcgcatcaaaatcaaaccttgtcacattccgtttgcccgcggcaaaatgagccgcggcggtgatgccgagcttggtctcaatcatgctgccgaccatgcattccacgccgcacgtttcggccatcgcattgattgtttccgcctgctttatgccgcccgctttcatcagcttaatattgattaaatcggcgcttctcgtctgcagcacgcaaaaggcctgacggggagtaaagacgctctcatccgccataatcggcgtgtctacggcatcggtgacctgcttcagcccggcgatatcgtctttatgaacaggctgctcgaccagctcaatgccgaggccggcgtcttccatctttcggatcgcagtcacggcttctttcggcgtccagccttggttggcgtccaatctcagtttgacgtttccgccgacacgtgatctgatcgcctgaatccgggcaacatcgtccgatatgtcacctatgccgacttttatctttaaaatatgaaatcctttgttcacatagcggtctgcatcccccgccatctcctcaggagaattgacgctgacggtaaaatctgtttccagtgtattccgatagcctccgagaagccggtaaagcggctgtccgtgcatttgcgcccatccgtcatatacagccatatccaccgcggcttttgcgctttgatttctttccaacagccggctgatatcatacaaaacagcttctatgccggaaaggctccgccccaagagagcgggcttcagcacatcgcggacggcgctttcaataccgtccgtgctgtcgcctgtaatgacaaccgtcggcggcgcctcgccccagccggtcagaccgttgtcaaatgtgagcttcacaatgaccgattcagcattgtaaaccgtgcgcaaagcggtcttaaacggctttttcagcggcacggacatccgtcccgtttgaatatctgtaatcctcacgcctgatcactcccttccggaaacccccgattcaatcgttaccgctttggccgccgtatccataaccgcgcgggctccgatcggaacggcgaagctcggtgaacaatggccgattttaaagcctttgagcgcgggcttccctgatttgacaatgtaatcgttcagcacttgctctaaagtaagcgacttttctttatgcttcggttcgcattggtgaaaatcacagaccagtattccggctgcgtctgacagttttccggccatctttaattgattcagcatcctgtcgatttgatacggctcctcatcaatatcctcgataaacagcaatttgtctttcgtatcaatttcaaacggcgtgccgagtgtggacgtaatgagcgacagattgccgcccgcaagctctccctcggcccttccgcctgtcagcacctccagcggagaaatgtcctccgtataggtgaattccgtttctgtaaaaagctgatgatacgacgcttttgtcaggggttcagcatcttcaagcccgacatccgtgctcagcatcgggccgtgaaatgtgacgagccccgtattttgatgaatggcggtatgtaaaaacgtaatatcgctgtatccccagaaaattttcggattgcggcggattaagccgaaatcgatgtcggcggcaatgcggcccgtgccgaatcctccgcacgcgcatatcaccgctttgacattctgatcactaaacatgtcatggagatcattgaggcgcgcccggtcttctcccgccaaatagccgtgacgggtcttcagcgcccggccgagtttcacttgaaggccaagctcattctctaaaaacagcagcgcggtttgcagcgtcccgctctcaggcgggcttgcgggtgcaatcacaccgaccgtgtcgcctttttgcagtgctttcggtttatggttcatgactttttcaatctcctttccggattgaaaagtgaaacacgccgctcctttaacggcaaaagagcggcatatgtttccgctgtaagatcaggacttttccgcccatttcagatcaatgtaaccgacggggtgccggacaatgcccttcacgccgctgttctgcagatgcacctgattgtaaaagtaaatcggaatgatcggagcctcgttcatgagcagcttttccgctttatgcatgagcgcaaaacgttttttggcatcggcttcctgttttgcctgcttgatgcagccgtcgtatgccgcgcttccccagccggtgcggttcatggaattatccgtttggaaagcctcaagaaaactgatcggatctgcgtaatccggtaaaaatgagctttgagagaactggaacttcagtcctttctgctcttctaaaaagacgttccattccatattggcgagcttaacgtctataccgagcacacttttgagcttctgctgaatcgcttccgctattttcttatgctccggttttgtgctgtatgtcaatgtaacggcgggcagcttgtcataatgctcttctgccatgcctttttccagcagttttttggcttctgattcatccggagttagtaaactgccgcccgcttcgcggaaatctttcccgtcaggctgagtaaatcccggggatacaaaggcatgtgccggcttttcactgtttttggtcacataatccgtgatttctttctgatcaatcgctgccgcgaacgcttttctgatcttttcattttgaaacggctccattttaacgttaaaacgatagaaatagagtccggcctgatcccacgtgcggacattttttcctcccatcagctgctcgctcagctctgccggcacaaaggcggtatccaaatcccccgactggaacatctgatagtcggtattccggtcactgaccatcgcccatgtcactttatccagtttcaccgtctttttatcccaatacgtctcgtttttgaccatcgtcatgctgtcgtcatgcttccattccgtcagtttgaacggcccgttgccgacaaaagtttttgcttcagtgaaccatttcgcatcagccttggcgaccttctcattaatcgggaaatacgccggattggacacgacgctcaaaaaataatcctgcggggccgccaatgtgacgacaagcgtttttttatcctttgccgtgactttcacgtcttcttttttgccttttccgctgttaaattcttctccgcctttgatcatatagccgagaaaagcggaagatgcgcccgttttcggatcgagcatccgcttccaggcgtacacgaagtcttccgccgtgacgggatcgccatttgtccattcggcgttatctcggatattgaaggtatatgtcagcttatcagcggacaccttccagctttccgccatggccggttcgggcttattatcttttccgagcctcgtcaatccttccatgatgttattcagcggctgccaggaaacattattaaatccgatcggcggatcaagtgaggtcggctcattttcgttattgagccgcagcaccgtctctcccccctgttcttttgctttgccgggttctgtccccgcctgttcattggctgtacagcccatcagagcaaacgaaacaacagcaatcacaccaatcgcccatctctttttcatttcaatccccctttttcctctgctgcagtcagctgctgcttcagccgctctgcacggtgatcctgaagccagcagctgacgatacggcttttggatttcacggttgttgccgggtataccttttcacagacgatcatcctgtccgggcagcgggcggcaaacgggcagcccggcggcggatcgaataaatcaggcggcgtcccgtcaatcggcgaaagctcactatcttccatatccagccgcggcactgaacgaagcagcccctttgtgtatggatgagccggacggtaaaaaatatcatgcctcgtgccgatttcggcgattttccccgcatacataacggcgactctgtcggcggtctgagcgacgacgccgagatcgtgggtgatcagaataatagacacgcctgtttttctttgaatcttcttaaataattcaaggatttgtgcttgaattgtcacatcaagagccgttgtcggttcatcggcgatcataatttccggctcgcagatcagagccatcgcgatcacgatccgctgccgcatgcccccgcttaattggtgggggtactgcttcaggcgggatttcgagtccgggataccgaccagatccagcatggcgagaacctcggattcagcttgttttcttgtcatggcgcggtgttccaacagcgcttctgagagctgatcccctatggtcaaagtcggattgagcgccgtcatcgggtcctgaaaaatcatagaaatatcgctcccccggattccccgcatttcccgatccgacattcggcaaaggtctttctgtttaaattgtatgcttccggattcaatctttgccgaatgtttcggaagaagacccatcacggcttgtgacgtcacgctttttccgcatcccgattcaccgacgatcgcaaacgtttcacctttatataaatcgaagctgacgcctcttacggcttttacagtgcctccgtatgttgaaaaagtaacatgcagattttgaacggaaagaacttgctgcgccatttttcctacctcctcagtttcgggtctaacgcgtcctgcaagccgtctccaagcacgttaaacgcgtacatcgttaaggaaatgaaaaaagcgggaaaaaacagccgccaccaatggcctgataaaatcgccggcagcccgtcatttgccatgactccccagcttgcaaacggcgcctgaatgccgagtccgagaaaacttaaaaatgattccgcaaaaatcgccgccggcaccgtcagcgtcatttggacaataatggctcccatcgtattcggcagcagatttttcttaatgatccgaaatgttttcgctccaaacgttttcgatgccaatacgtgttcatcatgcttcatcctcagcacctgccctctcacaatccgcgccatgccgacccatcccgtcactgtcagagcgacgataatggaactgagccccggccccatcagcaccattaacaaaatgacaacgagcagataaggcaaaccgtagagaacctcgatgattctcatcatggcgctgtctgtccggccccctttgtagcccgcgacgcctccgtagataacgccgatcaaaaagtcgatcagcgccgccatcacaccgacaaataaagagatcctcgctccgtaccacgttcttgtaaacacgtcccggccaagttcatcggttccgaaccagtgtgaaaaagaaggcggaagattctgctcggcgagcgtctgccttgtcacgctgtgcggtgatatcagcgggccgaacacagccgatagaaacaggcagcataatatcacaagtccggccatcgccaatttgttctttttaagccgccgccacgcatcctgactgtaagacaggctcggacgcttgaccgactcggtttcaccctttctttccgcgcccggctgaaaccagtcatcaggcacttctgtgtgttttaccgtttcttgcgggagattcatcaggatcaccctttcttatgaagttttatgcgcgggtctaacaggccgtatgccaaatcaaccagaaacagcaggacgatcagaatcacactgtaaaatacggtcgttcccatgatgaccgggtaatcgcgctgattgatgctttctacgaaatatttgcccattcccggtatggcaaaaattttctcgatgacgaaactgcccgttaaaatacttgcggcaagcgtcccgagtactgtcacaacaggcataagtgcgtttttcaatgcgtgtttgatcacaattttgacgggagaaagcccctttgcttttgccgtgcggatgtaatcctgagtcagcacttcggccatgcttgatcttgtcagccgcgcgataatggccatgggaccgacggcaagcgcaacagtcggcagaaccatgtgaacgggactcgtccaggtagctgccggaaaccatttcagatgaaccgcaaattgctgaatcagcagcgtagccattataaaattcggaatggaaatcccgagcaccgcaaggctcatggccgcataatcgagaaagccgccgcgcctgagagcggccgttatgccgagcgcgagtccggaaatcacagcgatgatgatcgccgttatcccaagctcgaaggagacgggaaatccgcgttcaagcatggcgtttacactgtctgacggttttttgattgaaggaccgaaatcaaaggtaagaatggattttagatagatggcgtattgagtgataagaggttcgttcagatggtagtaggattcaagatttcgctggaccgcttcgtttgtgccccgctcttcgttaaaaggcgagccgggtatcactttcatcatgacaaatgtcagagtggtgatgacgaggacggtcataatcatggcgataaaacgtttgataaaataccgcagcaatgccgttcacccctttaacagaatgttgttctcatagcgagttctgtcatgacgagcatggcctgataggcttccggcatgtcttttgcctgaaattgaacgattgtcgttcccgggatgatttctgtgcccggcattaaatgggcccattcagcctgtccgtaattggcaaattcaatgcctaatacaggtttttcaggcggagtcagcggtttgaccttatctttatttttgagcgcataggctgttttttccgtcaggagccgtccggctttttgaggggacaggcatttgaccgcggttcttgaaatggtttgtttgacggcggcagtcgtcacattcgggatcagctcctccgcctcttttgcggcgcaatcatctccggcagccatgatgaccgggacatcgtaaaatccggcgagataggcatttaaccccagttcaccgacaggcttatcatttatgtaaaagtggcggacgccgaatatcatgctgtgcgacatgacgcccggcatcgacgctctcgcatgatagccgataaacatcacacctgaatacgattcatcaagcccctgcatcatggaaaacggcttgacatcccccgtaatcagctctgcctcagggtgaagtttttccgcgagcagattattcatctttgagtggctgtcattcacggtcacttccgtgcatccgttattaaacgcttctgcgatgcaccagtttgcttcttcggtcatcagaaccctgccgcgctcataattgtgcatgctggaattgacaaatgtttcatcaggcagtccggaaatcccttccatatccacagatagatacagtttcatgtaatgcctccttttttatttaaaatttcgatattaaattatgaatattctaacaaattatattaaaaaaggatgaaacatgcaatataccattctgccattatgggaaaaaacaaacccttttcaccgggaaaagggtttgctgatagaaaaagttacataccgtttttgtttatagggtgaccccgaaactgtctgaccgcacttctgtattcgcgatcgggaatgacctgatgcctgatcggtccaggagcctgcggcgaaggcttttcatccgcctgcttacggacggcatgcggtttatgcgccagcttatgtcccatgccggtcgcattcatgacaaatgataaacacactaaaagcaagcttaagatgaaagcaataagaaacaaatcgctgtatgtccccatcagcaggtcatgcggcgattgtgtgccgcgcgcgccccgaagcatgccggaagcatctcttttcgtaaaataccctattaaaacaggtgcgcccatataaatgaacagccttaaaaactgaacggccgtcatgcgtttcaccagttccggaagcggtccgcccaacgcggcgcccatcagtccggctgctacgataagccctgtcccggccgccagcatcacgaaaagcgccgcaaatagaataaacggtatatgatgacccgccgtcatccattggaaattcacgaacaccagtataacagagcctgttatgccgagcatgcccggaccgactttatcatatgctaatgcactgataacagcggcgatggccacgcctcccaaaaggctcgcatataagaatatcagttgagtttgtgacatgtgatatgcggtctgaagctccccgtgaaatgcagaaagactgaccgctatggaaatactgcccgcagcgatcatgaaaacacccaaaatcggctttggaatcagcataagtttaatcgaaatcagcgcatgttcgtttctgtactgcataatcagcaggatcagcagaatgacgatgcttcctccaaatcccgccaatgtctgccatgatgaaaagccccatttcggcagatgaataaaagtataggcggtcagcacggctgatccacccgctaacagaaaaccgatgccgtcaaatggagatttttcagtatttttatgagcgtcatcccgcagccacatataactgaaaatgaggccgaaaaaagacagcaggccaaaaatgccgaacagccaatgccaatggccggcgcttgccgccgccgtgcctaaaacggtccccataatgacggacccgtaaaatccgccgattaacacaaataaggcgtaattccggcgttcaatcggaaacgaaagcaccagcatcggaatcataatcatcagcatagtgcccgccgcagctccctgtaaaaaacggcccgcggcgagcggataaatatcatttgtcacagcagcaagcagcgctccgatgacacccgcggccatcgaaatcatatagacaggccgggagccgaatctttttcttaaatacggccccgccggcacgaataaggcaaatgccatattaccgataataatcggatgaaaagagtcaaagttttccccgccgaccgtctgccggacaaggctttggacagccgaaagagcggtattcgacatcagccccggcccgacagccagcacagcaagcagagaaatgatccagtgatgtttttctttcatttgacagctcctttcttaactatttgacaaagtgaaaaagctaacagatttcccccattagcttgacagaattttttatatcttttcatgtgaaggattgaacataatatcccatttattatttcaaatccgatggaaattgtcaatataaagcgccgccgtccgatttcgtctttttcacaatttcccacaatcttttcattattatcccacactttttgtttaagatggagtcagtaataataggcaaatcatgctatgatgaaatagagaaacggagtgaacatgatggataactatcgtgatgaaaatcggacagaccaaaaagaacaggaagtccttttagtaaaagaaaacccgcagccggccggatattccgagccggacgaggacaagaaaaaacgaagcttcggctggttcagaccgcttctcggcggagtgatcggcggagggctcgccctcggcatctatacatttacgccgcttggagaccatcagactcaagatacttccaatccggctcccgctcaggaaacgtcatcggtaaccgccaagcagacatcttttgaatcagacagcggcaaatcggcaaacagctcatcggcaaattcaagcagcatttcgaatatggtggaagacatttcaccggcgatcgtcggaatcaccaatctgcagaagcagcaaagcagttccgatttattcggattcggatcaagctcggattcaaactctaatgcatcgggtgatgatgcggaaacgggatcgggttcaggcgttatttttaagaaagcaaacggcaaagcgtatatcattacgaataaccacgtggtcgaaggcgcctcttcccttaaagtgtcattatatgacggcaccgatgtaacagctaaactcgtcggccgtgattcgctgacggacttggccgtattagaaatcagtgataaacacgtaacaaaaacggcaagcttcggcagttcatccgctctcagaacgggtgaatccgtcatcgccatcggtgatccgctcggaaaagacctttcccgcaccgtcacacagggcatcgtgagcggcttaaacagaaccgtctcgatctctacgtcagccggtgagtcaagcatcaacgtcatccaaaccgatgccgccatcaatcccggaaacagcggcggaccgctcttgaatacagaaggcaaaatcatcggcatcaacagcatgaaaatcagtgaaaatgatgtagaaggcatcggctttgcgattccgagcaacgatgtaaaaccgattgccgaagagcttctcacgaaaggacaggtggagcgcccttatatcggcgtgagcatgatcgacttggaacaagtgccgcaaaactatcaggaaggcacactcggcctcttcggcaaacagctgaataaaggcgtttatattcgtgaagtggcgcagggatcacctgcagccaaagccggattaaaagcagaagacatcattatcagcttaaaagggaaagaaactgacacgggcagcgaacttcgcaatattctctacaaaaatacgaaagtcggcagcaccgttgacgtgaaaattatcagaaatggcaaggaaatgacgaaaaaaatgaaactgactcaaaaagaagaaacatcttcttaacaaaaatccaaggcagccgccttggattttttatatacagatgaaactttaggcctggatcagccgtatgactcagtgtacaaaggaggatacatacacatgaaacaaaccggacttttgctggtcgttaccggcctgatcttgctgcagctgagcattcagcttcctcagcaaaacgctgcttggggaatgacgcttggtgcaagcattttactgaaatttttcgtgaaccggactgatcatgcgctctctgcacacccagaccggccgcagatgaataaaaaaagccgcgggacattctgtcatcccgcggcttttattttacataaaagcaccctgtccgctggccggacagggtgtttgttaagacatatgctggtcccgataaatcttttcgtttttcataccgtacgctttttgcacgatatagagcggacgatcttttgcttcgtcataaattcttccgatatattcgccgatcattccgagcattaatagaacgatgccgctgaataacagctgtatcacaatcagagaggaccagcccgtaatggtgctgtctgtaaaaagcttcatgtataaaacgataaacatatagagaaaacccgctccggacatgagcattcccgcatagcttgccgccttgagcggtttatgagagaacgttgtgatcccgtccatggaaagcttcagcatttttttaagcgggtatttcgtttcccccgcaagccgctcatctcgttcatattctacagcagtctgcttaaagccgacccagctgacgagtcctctgacaaaaggatttttttcttttaatcttttcatctcatcacagacttttctgtccagcaggcggaaatccccggtgtcgagcggaatatcaatatcagtcacgctccgcagcagccggtaaaacagagaagccgtctgtttcttgaaaaaggtttctccctttcgtttcgttctgacggcgtacaccacatcgtagccttctttccactgctcaatcatatcaaggattaattcaggagggtcctgcaaatcggcgtcaatgacggcgattgcattcccctctgcataatccatacccgctgtgatcgcgatctgatgtccgaagtttctggaaaaatcaataattttcactctcggatcaatcagactttgctctcttaaaatctcaatactgcggtctttgctcccatcattgacaaagatcaattcataatgctcttttgtttgatccatgacttctttcaggcgctgataggttgtctgaatgacgagttcctcgttataaaccgggacgactattgaatattgaatatgtctgctcatgttttttcctcctattcatcagattgaagttcgtatagtgaagctgactgattcattccgcccggcccgccgctcattcggctgtttttacccgcggccttgctgctttttgtatcagctgcatcatgatttttcgttttctgatctgtgcttgattgccatttgtatgaagatactttctttccggttttctcaacccattcaacaatatcgttgtttccgcctttgcccattccggatgttaagaagtattttactttcccttcttttacgagctttttaaattgagtcagcgtaatggccgggtcagacccgctgaatccgccgatcgccatgaccgcttttttcgtttttataatgtaaggcgccgctgtgttggaatcggttgcagcaaatagataatccgctccggcgttatgtttctctaaatagttgatcagttttgtattgacagatgcgttatccattcccatgccttttccgcctgctgacgcaagctgagggcctgtttcaggcaatgagctgttgcctccgtacagaagcggtgtgctcgcccaataaatcggcatcaccatcaagacgagaagggctgcaagtgaaacatagtaactgagcggtttttggcgctgtttgaatacgaacagggcgattgccgccactgcaccgagaacgcctgctccgatgctccagcctgcgccgatttgatcattgtagtttttaaggataaacagctcaaatccggtagtcacaagaatagcggccggcaatagccaagttttccatcccgcctgcttgcggtacagatgaacgagggcgacccatcccgcaccggtaagagcagcaatcggaggcgccagcataatgagataataatggtggaaaaattccgccacactgaagaatccggcaatcggcacaagccacgctgcccaaaagatcgtttccttctgttctgctgataatcttcttctttctctcgccccggcgatcaataaaccggccaatccaaaaatcgcaaacggcaggagccagctgatctgatcagataattcttgttggaagagtctcagcggaccgggtgttcccgtaccgaacattcctgaccctgactgcattttcgagccggtgcctgtaccgctttttcctccgccaggaccgcctttgccgccgtctccgccgcttggagggcctccttgaccgccgcttggcatttgtccgttagatggaggtgccgtcatactgccggtttgtgatttgtctccgcttgctgactggccggccggtttttgcatttgtgaagaaccgccggaagaagacatccctttcgatgcgtttccgtcgggcccgccctggccgccgccggaactttgccccgtcagccgctgaatcccgttatatccgaaagccaattccaatacggagtttgtctggctgcttccgacatatggccttttgccggcaggaatattgtcaacaatgagcggccatgacaatgaaacggctgctaatacggccagcgcgcttaccagtgaaatgatttttttcttaatcgcggtatttgccgccatcatatagaacagcaagaaggccggtaagatcatataagcctgaagcatttttgtgttaaagcctactccgacgacaaaaaatgccgccaaaagccagatcagttttccttttcgaatcgctttaaagagaagccatgtggcgaacaagaggaaaaagaccagtaaagcatcgacattgtttgtgcgcgctacggctacagcaatcggtgtacacgccatgacaaacgaagcgatgcgcgccgccgtttttccgaacgtcggctttattaataagtacatgaatagaactgaacctacccccgccaatgcctgaggcaggatgacactccacccgtgcataccgaatatcagcgcgctgatcgtttgaatctggtatgtaacaggcggtttatctaccgtgataaatccggctgcgtcaaatgaagcgtaaaagaaattatgaaagctttgaagcatactcgttaccgctgcggtgtaataaggattcaccgtatcgtcattccagatgttgtacatattcaagaatgcggaagcgagtaaaataaggattaagactgcgtctatctcgcgttttttcattttcacctgtgttttcactccttttgtttaactttgaacaagtgtaacaaccaaatgtgaaaaatttattaataaacaaagacatttattttgccgtttacaaataggtaaaaagaatgacaaaacgggtaaaaaagcaaaaaaaaagatgcccccgtcaagccggaaggcatctttcattacttctgatttactgaatcggtttcagccgcgcttctatttcagaacggcggtgttcgagataaggcgggagcgcaaccgttttgcctagctcttcaggtttttcatcaaccataaatcccggaccgtccgttgacaattcaaacagaattccgttcggttcccggaagtacagcgctttgaaataataacgctctacaatgcctgagttgctgaaaccttctttcgtaatgatgcggtgccataaagcaagctcctcctcattctgaacacggaaggccacatggtgcacgctgccttttccaggacgctcgcgcggaagatcgtttctttcaatgagatggacttctgtacgcgcgccaccgtttccggattcgagcaccgtaaccgcgccccggtcttcatgtgtttctttcccgatttcagtgaagcccagcacatcggttaacacacgcagcgtcggttctgcatacgggacggtcaattcaacgggcccaagaccgcggaaagaatattcttccggtatgccgctttgcttcaccgcttcaccgatgtcttttcctttttcgtcagctgtcagcacaagccgctgtccttcatgatcctgaaaagcgagtgtgtccctgcccgctattttcacgatctcaccgtgagagacctgatgctcttcaaatcgttttttccaatattgaagcgcttgtgcatccggaacacgcaggccgattgaagaaatactgtttgtccccgcatggaacggcgcgatccgcggaatctcgaaaaacgtcaattccgatcccggattggctgattcatcaccgtaaaataagtgatacatcgtcggttcatcctggtttaccgattttttcacaagcttcagccccaggatatttcgataaaaatctaaatttttctgcgcatcagccgtcaatgctgatacatggtgtattccattaactttcattatgttatcctccagtcaattatctcgatttcgagatattttatatatacaatttatgttatccggatcgtaaagtcaacccatctgcttcacagacggtctgcagactgccgctctcaaaataacgaacttttgatattaaaaaaccattaatgttcgcttttaaaacagtattttttccttctcaaaagcataaacctttatcttttaggcaaaacaccaaaatcagaaaatttattttattcgtgtttcagcaattagggtttacaatatggaaaatagttttttcagcataacgattttacatctggagggaaaggatatgcagattgaagagaatggacttaaaaaagagatcggccttaccatcgccctctcacttgttatcggcaccatcatcggttccggcgtatttatgaaaccaggcgccgtgcttgcctactccggtgatgcgaaaaccgcgcttatcgcgtggctgttaggaggcattttgacgcttgccggcggcttgaccgttgcggaaatcggcactcagattccgaaaacgggcggactttatacatatctggaagaagtgtacggcgaattttggggctttttgtgcggatgggttcaaattatcatttacggccccgccattatcggagcaatcggcttgtatttcggctctttgatggcgcacttgttcaattgggattccggctggtctaaattaatcgggatttcagccgttttatttttaagcatcattaacattatcggaacgaaatatggcggcatcgtacagggaattacgactgtcggcaaattgattccgattatctgcatgatcgtgttcggcctttggaaaggcgatcagcatattttcacagccgtcacaagcagcatgtcggaaatgaatttcggcgccgccatactggccaccttgtttgcttatgacggatggattctgcttgcggcactcggcggcgaaatgaaaaatccggaaaagctgctcccaagagcgatgacgggcggactcttggtcgtcaccgccatttatcttttcattaactttgcgctgctgcacattcttcctgcgaccgacatcgtcaaactcggtgaaaatgcgaccggcaccgctgccggaatgctgtttggcgacatcgggggaaaattgatcagcgtcggaatcatcgtcagcatcttcggctgtttaaacggaaagattctcgcttttccgcgtgtctcgtttgcgatggcggaacggaaacagctgccgtttgccggacagatttcgcgggtgcatccgacattccgcaccccgtggattgccgtgtcatttcagatcgcgctggccattattttcatgatcgccagcaatcccgataagctgtctgagatctctattttcatgatttatattttttacgtcatggcttttttcgccgtgtttatcctcagaaaaaaaagcggcggaaaaccgcgcgcctacagcgtgcctttgtatccgatcattcctgttttggccatcgcgggttcactgtttgtgctgatcagcacgatcattacagatacactgagctgcgcgctgtccctcttgatcggcctcgccgggctgccgctttatttttggctgaaaaacggcagaaaaaactgacaaaaacggttccttttacgggagccgttttttttctggcaaaatcacgtgcaaaagttgacagcaaattcacatcttttgttatactttttaagcaagatgtctgaattcgaagtatgttacgtttttttggcgaagtgggtaacataagaaaaacaggatgagacacgtttttacgaaaaaatcaagaggcgtttttttcgactttatctgttttttttcgacaaaaggctatataataatttgatgtgtgcattgtctcattcaaacaatggagggtttttaatgataaaaagaaaaaaagataagttctcactccttttaacagaaatcgcaaaaaacatagacgaaaccgcagaatactttgtcaactttaaagtgacgaaccagacgactttaaaggaatttgccgatacgttaaaagagtttgaaacaaaaggagataatcatgttcatgtcatgattaaagagctgaacaaagcttttatcactcccattgaacgtgaagacatccttgagctgacaaacagcctcgatgacgtgcttgacggaatcgaacatttttcagcaatgatggagattttctcgatcacttcttcagatgagcatatcgataagttcagcggatacatcagagagtgcgcgaaggaaattttaatcacgattgagctgcttgcagaaaaccgattgaaggacattcaccctcacgccattaaaattaaggaatacgagcacagctgtgataacctgcaccgtaaatcattaaaaaatctgttcggcacagaaaccgatccgattaaagtgattcagtaccgcgagatttacgaaacgcttgaggaaattgccgactcttgccaaagcgttgccaataaccttgaaaccattattatgaaaaacgcgtaacgaggggttataatggatactctattacttttaacgatattaattgtcatatgcgctttggtatttgacttcattaacggatttcacgataccgcaaacgcaatcgccacctcagtttcgacaaaagcgctgaagccgcggcacgcaatcgtcatggccgccatcatgaactttctcggagcgatgacatttaccggtgtggcgaaaaccattacgaaggacattgtgaatccttatacattagacaacgggtcagttgtcattctggcggctctactcgccgcaatcgcctggaacttgatcacatggtatttcggcattccgagcagctcttcacatgcgattatcggagcgatcgccggagcggccattgcagcgtcaggttttgcgacgcttaattataaagggttcattaagattatcgaagcacttattttatcgccgattatcgcctttgttctcggctttatcgtatattcgatcgtgaagctgatttttaaagacagcaatctggcgaaaacaaataaacgcttccgcagagtgcagattttgacggctgccattcaatcctatacacacggaacaaacgacgcgcaaaaagcgatgggtatcattacgatggcgcttatgacggccaatttacataaaagtgatgccattcctttttgggtgcagctctcttgcgccctggcaatgggtctcggcacatccatcggcggctggaaaatcattaaaaccgtcggcggaaaaattatgaaaatccgtccggtaaacggcgtatctgccgacttaaccggcgcagccattattttcggggccacgtttattcatctccctgtcagcacgacgcacgtcatttcgtcttccattctcggtgtgggcgcttcccaccgcgtaaaaggcgtaaactggggaacggctaaacggatgcttattacatgggtcatcaccctgccgattgcaggtacactcggcgccatcgcctttttcatcttagatctctttttctgatgacatccgcttctttacagaagcggttttttttgtgacaggaaaatgatgtcatgacatagaatgaacatagcagaccatttttcgaattgtgagggatgctcatgcttttgttttttcagatcatggtgtggacgatggcggccgcactcattttatatgtgtacgcatcctggcggtatgaagcaaaggtaaaagaaaaaatgtttgccatccgtaaaacgtggtatttactatttgtagtaggcgccatggtctattggacatatgatcccgaatcgctctttgccgcatggagacaatatttgattgttgccgtctgctttgcccttattgatgcgtttatctttttgagcgcgtatatcaaaaagctcgccggcaatgaattagagacggatacgcgggaaattttagaagaaaataacgaaatgcttcactcctatcttgaaaaactgaaaacctatcaatatctgttgaaaaatgaaccgatccatgtatattatggaagtacagaagcttatgcggaaggcatcagcagactgctggccgcttatggagaaaaaatgaatgtcacggcttccttgtgcgactattccgcacaatcggataaggaccgcttgacggagcatatgcctgatgcggcggacgttcagtcccgtcttaaccgtaaagacgtctactatgatcaaaaaggcaggcttgtgcttattccgtttacagtccaggaccgccattacgtgatcaaactcacgtcggaaaacctgttgacggaattcgattatttgcttttcacatcgctaacgagcatttatgatttaatgctgccaatagaagaggaaggtgacggttaaatggagcaggcatttcaaaacgggcagccggaacaaagagcgaaaccgttcaaaatgtttaaaaaacgttcaatgacaagtatcgcaagttaccaggtcagccctcataccgccagaattttcaaagaaaacgagcggctgattgacaagtataaacaaaaaaaagcttgattacactaaggacaggagacacggctcttgtccttattccttttttccatatctttcatataataaaaccaacaaagagatgcgacaggtgatgatgtgaagaaaattgtcagacgcgtaaagtttgtggattacggacgcttcgggctttccgcttattcgctgaggatgcgggcgaggaatctcgggttattgaaccggttaaaaaagaaaaaaggctgaatcccgcaatgtgaacgggactcagctttttttgttaaagctgcatcagaattttcgcttttacagcgggaccgtagacgccgtcagacgtcagtccgtttacagattggaagcgggccacggcatctgccgttttcggaccgtagataccgtcaatgccgttattgacagctcctttttcaggatagaaataaagcgcggcgagcgcgttctgcacctggtataccttttcaccggacgtgtacggctctgtcagcttgatcacctcgtccggaagagaatacagtgcttcaaccggcgggctgacgatcagcacttgtccgactttaatcaagttcgggtcagcgatgttattccatttctgcagatcggccacgctgacgccgaatttccgcgcgatcgccgacagtgtatctcctttttggacggtatacgtctgtctttcctcagaaccgattcccgctttaaactcatcccatgtatccagcagtcttctcggacaaagctttcctgaccaatgcttgtgcgcaacgacattcgcaagcgggatgccgtgcgacgtcattaatgtgcggatgagccattgggcgtttgccacggcctgtgaaaagttgccgtctgcgttttcacaaatttcaataccgatggatttacggttgccgtccccgtttccgtcaccggcatgccagccgttttcgttcagcggaagatgctgataaatttccgtatcatcgactgtgaaatgccagcttgtcggtgtatcgggatttttcacatagcttgcgtgacttttggcgttagctccgactgcggtattggctgtattgtgcaccgtaatgtaaatcggtgtcattgcatagcctgggcggttattgtttcctgccgggataaaatcctgtgtgatttttaccatattctcatctctcctatttcgataaattgtttatttttaataaagcctgctgttttttcccttttgctgtaacataattgtttttaaaccaggcggcggcagtcgttatgattgtaaaaacggccgacccggcggcatacagcgtatctgcaagctggctgacctggtcctcctgaatattcagcggcgatttgccgaacatcagcaaagtttgattcaataaagcaagcaaaagaagcaccgtcctgacgaccgtgcctttgtccgcgaatttcatatcggtttcccccttacttttgcagcagattgtacatgatggcgattgctccgccaatgacgcccgtgcagattgctgtcacgatcgctcctgtaatggtccgcttaatccatgttgtgttttcgtcaattttgttcagtttttcattcagcgtcatgatttgctgatcctgccggtctgatacccgctctaatgcggctacccgctgttcaagcaccttttgttcacctttgatgtctgcgaattctttttgcaccgcttgttcatccagaagcacttccgctccctcctcttacattgttctcacctcccttcggaagcttcattcttaagaaaatgccgtgcctttgacagaaaggctcccgccggaaatgctcttgatttccatgacgatttccttaaagccggcaatatcaaatgaccacacttcttctgtgcctgacgtaccggcggctgatgtcccgtcatcagacctgattcctctgatcggcacattttttcccgagatggatctcccccaaaacgcgacatggcccgactcagccgtaccggtgatttcgacgagaagttttttccaagcgcctgctgagaagatgcttccctcgcccgcctctgctgcattttcatgaaaaatcacgtctgtatatgaaaacgccatatcaccgcccgtaccgacagattggtataaaacaaattcggactgcttttgatttccattttcaaaacggaaccggtaatatctttttgtcaggctgacccaccccgaagcggtcagcactccgccttttactgcgacaaaatgtgaagctgtccacgaattgttatcctcgctctcttcgataaaaagagttccgctgcggtccgaataagcccacccctgtgctctgtctattaagacggctcctaaacggtcttgtccgaattggctgtagacttcaatcgcttctagcggcgtattggtaagaagctctgccattccggacaaatcagcaaccggtgtgacataatcgtttttgttaccgcgataagcttttacggcgccgggcctgccaagttgatcggcgggaaattcaaatgaatgctttttcatcggccgtcctcctgttctcatttattaaaaatgacaaataaaaaaagccgtttggcttatgacacagcatttttatagttttcgtatgtttcacccgttatttcttgaaattcctcaggcgtgatatacttcgcggccaccccttcagccagatcttcggcagagcagtcatcatagcccatagcctgttttaccatttctgttgaggcccactcataaaacaaggcgtaaacccaaaagttaagttttttcatttttttcattctccttttacgtttaagagttccagttttaaagacgctaattgcctgccgagtgactgctgcgcttgttcggctgcttttctggccaatttctcattcgccagctgtccgccgaggcctgcaagctggtttgaatcgggagccgtatctttttttaagctctctttatatgcttcgtcagcggtttccacccattcttgtttctcttcatcaaaaaatgggcgccacatgccttcgccgtttatttccggcggaaagcccgcagcgttaggcggcatcacataatctcctgtctcagaatccggataaagctcaaccggagtgcctgtataaatgttgtcattgtcatacggaaatattaatttcatattctcgctcctttacgtgagtgccaaaacaaggtcaatataatagccgttcacgttattttctatattggccataattcccgtcagcttcatatctccattagaatagataataaatttgctgtaaccggtggtgccgctggctgcaaccatcgttacaacgcctttggccggcgcacaagaggatggcacactcccgaataccacttctctgtccgtaagaacgtgtccgttcaggtgaagggtgtttcccactttacggtattgaagcggcctgtctcctgatttagcgccatttttataaggaacatttatccaaggtacattctcagtatcaagttcagtaacgaggcgacgccagccctgccagcccaagttcaaatccaaatagttcgtgaacatattatttttataatcgacggcaatgacatacccaaacgttcctttcccctcactgtcaagagaggtaaaatgaaacatgccgcgggttgaagcgttgctcggactgtttgccgctttgccggttgaataaaaggtgccgaacgccctgccgtttttaacgattttttcaagaaagttatcatcatcaccaattgtcagaagatagccgccgttatcgtttgttattttcgaaagctgtgcgccgttccacatatctttatccgcctgtgtgacatgaatgtcttttttattggcgtgagcctctacttttgcttgagagcctgaatctgtttcttgttggctccattccgaccatacgcctttagtgctgaaacttcggacgtatatgggatttccggcggtcactgtgtctataaacatttggacaaaagtcggtgatgctccgcgggttctttgcatgacaattaattgtccgtattccgcaggcttattttctgtatgctgaactgatatatagtagatgccggacgtttttatattgtctaagtttgtttctgttaccgttttagcattcccgtcattgtcagtcagattgaataactgccctgcattccatttgtctttgtcagacttggttacatgaagatctgttttgtcggcatgctcatttacttttgcttgtgctccggcagctgtttcaaatggcatccattccgtccagatgccgtttttcagcgtttttctccaaaatcccccgtcatctgagaaagcggccgcctctccgttattctttgaagaataaaggtatataccctctgacggtttaggcggggtatttattccggttgcagctgctgagaaagtaaaggtcttattctggctggcagcggtctgatgaaaatcctgtccgtcagagatattaataaaagcggagccatcatcttttgtgattttagacaattgcccgttattccacttctggcgctcttctttcgtcacatgccggtccagatcttgattgtgccggtcaaaatctttctttgctgcctgctggacattgtccacgtttccgaggccgatttgcgcctttgtcgttttgtgcgggttgttcatgtcgtttttatgggccgccagatccgtgtgggcgttttttatgcctttttcccagcggttgacgtcatcttcattaatcggatcgtccggaagccagtctgttttttcttcgtaagccatcgttacaccacctcaaaggtaaatcttaaatcaagcgttctgttattgctgagatctaaatttgtttttcgttctgtaatgacgcttcctgtttcgtcaagcatctgcacggtttcaatgtgtttgacgtcttcttccctgcgtgtgagaacggtgactgcggcatcttttacggaaatgtccgcaatcggagtttctttgccgtttaacagcacttttgtgatcctgtttttcagatcggctgcggcacgctgtctgtaagcggctgatatcatggtaagaccacctcgttattgttgagtgtgacggaataaccgaccttcagttcactgacttttcggtatctccgattgttgagaatgacccggtctttgatttccagtgtttcgtttaatgcggctctcagtgtatacgccaaatgagcgggtttgattttttcaagcgtttcaatcagctcgttcatgtgctgcaggtcatcaagcccgatatcggcataaaaacgatactgccccggaaacatccgaacataagctgacggatgttttaaaaaacggtttagcgcctgctcgatcgcttgatgtgtgatgggcggaatattcgacatcttcgagatcagcctgagccgtctcatatcctccgtgtcacctgattcccgcggtatttttaatattttttcccagcggtcaagcccccatgtcgccgtcgtgataaagagctgatccgtcaaatcgaaaatatcgttattctgccgctcaaactcaggagcttccgccataagcagttgtgccatctcttttaatcgggttaaaaacggcgggaggtacgccgtcatctcatcgagtctgctcaaggattttcacctctttgagtttaggaatttccacgtcactgagcacgaggttttctgccgcaccgttcattttaatatcggcgtagtcactgacggatgccgagttataaacgatgttgttaatttgtgataaacggacggtgttttcttcaaaggccattttcttgaataaattcagtacgcctttttcaatctccgcttttacgtcatcgatcgagctgttcagctcaggcagcacggaagcggagatttcgatttccttccatactgcgctttccaccgttactgccgctccgatcggcgcctgtccttctccctgcccttcgtccggatcaatataatcctttacttttttgatcagaatatctgatgccggttccaaattcgcatttgtgatgacaactttcaccgttccgtctccgttccaaagcgggaagatttttgccctgccgacgccgtcaatctcttcggcccattgtttataatgctgtttatttgcgctgactgcctcccggcggacacgggtaaaatagcgcgcccttaagctgttgtcatcttcttcctcacggccgggaattaatatatcgcgcatgactgctttctcaagcccgggtatcgtatcaagcggcagcaggttctgccccgaaatgccggcattgcccgcttcaccggctgtttcacattcaagcgttccatcccccgtatattgaaaatacaggttatcaacgaagaaacgggagcctggcggaatggtgatgcccgctgtgaattctccggctctgaccgctttagtggcaggtgttcgttcaattcccgcctcagcagcacgcctgtccagaaattcaccctgagccgtatcggaaaacacgagctccagcacggtatccagccaaatataagactttgcgagctcagcggccgcaggcgcgagcgcattgtaaatgacgctgccttctctcgtatcaatatccgccgtaacgcgcgccagcattctgtccataatgtcgtcaaacgtctgagcttcaaacatcctcacccagcacctcctctatctcaagcatgccctcatcagtttcaacggtaaaagagacgatgaaggcatcatcttttttctcaatctcaaaattggtaacggccaaaatacggtcatcatacagcaaggcttcttctatcagtcttggaatctccatttttttataagcatccgtcgtgttctgatctgaaagcacttcctgaagttcgtttccgatatcatggctgaaaaccgaatatgaataccgttctgtgtgaagagcgatatagacgaattgtctgattgcgtccagtccgtttatcagttcattggtaatccggttgttttcaaagtcaattcggtaggtttgtgaagtctcaacagcctcactcgcatcctccaaatcttcaaattcgatttccggtgtcagggccattgcacccgctccttttagatttgttcatgtaaaaaagccctcttcggcagatgaagcggctttaataggctgatattcccgtatatctccgtccggatgccggttaaattttgtccagtacaaagaaagactgtcctcctgttaaagcggcggtcatcacccgatctcccgcctggagctgatcatcttctccggatctcagccgcttcggcacaatgagtgcatcagacggaatcaaaagtttgtcgtgatctttcagtttcagctcgagcggcgaaacggaggtcacttcggccggcatcagctccaccggcgcttcagcgtcaaccgctccgacggctaaatgtttaatggcatcacttaatctcatcaggctgtcccctccggaagtgaatttttctccgtgacgtcaatcgtcatggtatgttttgttccttggaattcatggcggtccgtatctacataataggttttcttcagcccgatttccggaattgaaatatagacgggcaatccgctttccaacccaggaataccgatcgcctgtatatttttcagctctttcttaatgccttttttctcagcctgcttcacttttgcgcgctgtttcagctgggcttcgttaatgtcgtcagaaaccgtttcggtatactgcaaaacgccgaatgttttcatgccggcgctgtctgaggcggaagcctttatcgttttattgtctttttgcagccgcatgacgacacgggttgcggtgtcatcaattgaggtgctgtattgataccctgtaatattaactcctgtttccagcacccatatgtcagacggctccggccattcacgcaagccgagcctgcctttttctgaatagagctgataattgcgccccgtctggctttttgtctgctttaacgcttttagcatcatatcgtaaaggcttgtatcatttttaaaaacgagtgatttaatagtatggcctgtgttggcaatggatgtgacgggaatttgaaaatcgctggcgatcctttttaatatttgatcagcgcgcttgttggaaaacacgtaaacgtcctggtttttcacaaggtattggagcatatcgtatgcggtgaaggcgacggtatgctcatcgggcgttcttgcaaaaacaatgccgcggaacagctcttttccgttccatttgaacaaaaccgtatccccttctgatacgccgtaatacgtctggctgccctgctttacgacaatcgtcgcttcgatggagcggggcgcctgatatctgtgtccttccagcgttacgctttctgtgacaagctcgagccactccgtttcttttatgacaaatagttcaatcatcttttcacccgtttcattgcggtatcttcagcttctgccccgggaagatccaatgccccggctgccggatattccgtttgctgcgcttaatcatggcggttttattcgcgttccagattttccgccactccgtgtgttttccgtaaaacttgccggcgatgtcccaaagcgtatccccttttttgacggtatatgttttgggtgaagctttggacgggcgcttcgctttcgtttttttcttttgtttgatttttcttggcgaagcggttttatattctttcagtacgatatcaaaattccggtcgccgatttcattgtcaccttcgctgtaattaaagctttcaatgctgcatgtgacattgatttttgtccctgtaatcaaaaactgaacgggttttttcgctttcatccatgcttcaatggctgaaatggctttttccggtgaaggaatgctttgatattcggcaatcgggctgtaccgtttcggaaaaaaagaagagaacgaaatttctttcgctcccggttcttcgataaacgtcacctctccaagtccggtgactttcacggaatcattctgcacgctgtttgcgatatcaatcgcttcagggagaacgggaagccggagcttgtccttcccttgagacagccaaaattcgtaaacagatttagtcaaaagcaacggccccctttgctccggtataaatgtctttttgcagttcatcaatcagcgcctgtttgattttggcggctaggctctcggcgtcctgcccgttatggaaatgctgatcgccgctgaattcgattttaatttcttttgttcccgttttttgaacggtttggccgccgcctttaacggctgcggaaaccgtgccggctgaaagcgccgccggttccgtccgggacggatcggacacttccatgccgagcgcctgagccgctttttgcagcagataacggccgcggatgccccgctcttcagggatgatccactcccgtttgttcccttcgccgacacgggcgatctgctccttggtaatcagacccccattggcataaccgacgtaagggccgccatgagccatacttttaatcccggggacattgctgatcgagccgtatcggcttttaatatagccgatagcggcagcggcgttgtggattggatttctgatatcattcatgcccggcgctttgtgatcttcaaaggtgctcggaatcgtctgcataagcccctgtgacgggtgtccggctttggcgttgctgtcccatagattaatggaattagggttgccgcctgactcatgctgtgcgatcgtcattaatcccggaagccagctgatcggcgtattggttgctttcattgcggccaaaagccattctttgacgcttcctcccgctgcacccatgccggaaaaggctgctgcaagcgagcctgcctgtttttccgcatattttttcacgtcaactgagctgagacctttgacgacgccgactgaagcaaagcgtccgagactcatcatgacacgggaaggagagtgaatatcaagctcttccctgaatgcgtcctcgacttttttggccatatctttggccgcctgtttgacttcgcttccttttgcagtcatccctgatacgaagtgtccgatcaggcctgacccccagccgttcgcggaatctcttgattgaacaaacggtttattgatatgtgtgcttacgtattgcgacgttcccgtatcttttgcattctgtccggccgaataacctttcactgtggcggcgccccatgatgacgattgattaacctccgattgataaggtgttttcacctttgtttttaaaaacgaatcggtgcccgtcggcgatgtattctgacctttggcatagcccgcagcgacttgctttccgtaatcgggcgaagacgaaataagggcgttaaacggcgttccgatgtttttctctttccagccgtccatatccaccgctttattgctgattccgctgtcaaagccttcagtaaactgtttgccgagtgatgaagccgtccccgcaaatccggaagcatccacagacgcagcggccgatacagacgccgaagaagaaacaccgcccgctcccgccggcacagcggaagactgagccgaagccgcgcccatatcatcgacaacacgcatgccgagcttagacgcagcttgtgaaagcagcatcttcccgcggccgcgattgttgtcgacggggatgacaaattctttaccggcttcaccgatccaggaaatggtcggctttgtaatgtagccgcccgtggcgtttttgtccgtttttttctttttatctccgccgcctcctgtgacaaagtccattacgcctgaaatcaatttgccgccggttttatcccaaatctttttcacccagtcgaatgctgcagaaaaagcatctgatatggctgttcccacttttacaagaggttcttttatatgtttctcaaaccagccgcttaaccctttccatatatcctttaccgtatctaaagcagtcgtgaaagcgtctgatattccttttccgactttttccaccatgtttttcaccgggttccagacaatatccatgaaccagccggataccgtactgaaaacagatttaattttatcccaagctcctgtgattttactccaaatggacgtcgctactccgacgacagccgattttacgggctcccagacagtgctcataaaccagccggatactgtgctgaagacaccttgaatcgtcgtccacgcattcacgatatttgaccatatgcttgtcgccactccggcgacagctgatgaaaccggcgtccatacattctccatgaaccaggatgacaccgtgctgaaaatcccttgaatcgtcgtccatgcattcacgatatttgaccagatgcttgtcgccactccggcgacagctgatgaaaccggcgtccatacattttccatgaaccaggatgaaacgcttccccaagtatcttgtactgttgtccaagcactttgcgccgcttcggaaatatcattccatgtgtctttcaaagcccctgaatcaaaggcctctcccaagctggaaccgcctaaactgccggcgatgccgcctaccgcgccgccgattaatgtgcccactccgggaacaacgctgccgattgccgctccggccgcggctcctgcaagaccgccgcctgctgagccgaccttctctcctgcattatctttattgatgccggctaaatcagtaagtgataacaattcacctatgccgggaattcctttagcggcaccttttaaccctttcataccgcctttcagcgcctttgaatctcctaagcctttcaaaagcccgccgatgcctttacctgccccttttgttttcggcgtgtttacggatgcctgtttgctttcctttacggaggaacctcttttcgaagatttattccgcccttcgactttactgcttttgcccctcgtcactccggtacagcagcagccgccccccaaagccccgccggtttttttggctgaccttcctgaagatttcggtgatggtcccgtgcgctgcggaccctttgtcagctcaggacgcttcgggctgttggtgccgccggcagaaaggctccccttactcttttcttttttcgtgccgcctcctaataatccgccgatattgagtttgcctaatttttcagcgattcctgaaaatattttttctattaattccccggctttttcgatgattttgtccgggctgaatttctcaaatttcttggcaatcttgctgacaattttatcaacaaatgcctcggctttttcgatgatcgcatcagggctgaacttgccgaactttttatcaatgcctccgaacagtgaggaagtaaactgctccactttttccagaatcttatccggattgagaaaatcgaatttctcagaaattcggtcaatcgtgtcatttacaaattgttcggcgcggtcgattagcttatcaggactgaatttaccgacaacgtcgtcgactttcttcataaacgaatcagtaaaatgatccagctctttcaatatggtctccggactgaatttgctgacaacgtcatcaacctttttcataaatgaatcagtgaatttatccagttctttcaatatggcttccggactgaatttactcacgaccccgtctacctttttcataaacgaatcagcgaatttgtccagctcggctaatatcgttgccgggctgaatttgctcgcgatttcgtccgcttttcccatgaataaggtcgtgaacttatccagctctgctaatatcgtctccgggctgaatttgcttgcaatctcgtccgctttccccatgaatgaggtcgtgaacttatccagctctgctaatatcgtctccgggctgaatttgcttgcaatctcgtccgcttttcccatgaatgacgtcgtgaacttgtccagttcggctaatatcgttgccgggctgaatttgctcgcaatctcgtccgctttccccatgaatgacgtcgtgaacttgtccagttcggctaatatcgttgccgggctgaatttgctcgcaatctcgtccgcttttcccatgaatgaggtcgtgaacttatccagctctgctaatatcgtctccgggctgaatttgcttgcaatctcgtccacttttcccatgaatgacgtcgtgaacttgtccagttcggctaatatcgttgccgggctgaatttgcttgcgatttcatccgctttccccatgaatgaggttgtgaacttgtccagctcggctaatatcgttgccgggctgaatttgcttgcgatttcatccgctttccccatgaatgaggtcgtgaacttgtccagctcggctaatatcgttgccgggctgaatttgcttgcgatttcatccactttccccatgaatgaggtcgtgaacttatccagctctgctaatattgtctccgggctgaatttgctcgcgatttcgtccgctttcttcataaagcttgcagcgaatttatccagttccgctatgattgtttccggataaaatttggatgcgatatcattgacttttttcatgaaggtgtctgcaatggagtcaagcattgaaaaatcatttttcggcgaagcaggagcagcagatgcagaagcttttccgacgtccggcatattcttttgcattgcagccagctgtgctgtcaccttttcgtttaacgataattgaatgacattgtttttccccgtcagcgaatcaatccccgctgaaattcggccgactgttttcatgacgtgatctatgacgcgtatagtgacagagtacccgttctttaacgcagattgcatgtagcgtttgatacgttccatggcaggagtcacttcgtctgacgcatacagtgaaacggtaaatcctttaaaaccggcagccagatcccgcaatctctcaaatgccgctgtcgcgctgtcttttgctcctattttaacggttaaagacgcaggcagacccgctaattgggcttgcaccttttgaatgacggcactggctccgtcttcagctgaaatagagatcatttgtgcgcccagctttcttttcatagagcgctggatgcggtcaattgttcttaaaacagatttactctctttgcgtatatcaatttcactttggcgttttgtcattttcctgtatttctcaagcgctctgaagccattttggattttccttattttctttgaaacccgatcttccaattcaaaacgggcggtcagctttgccatgatgtcgctccccctttcttcgcttgtttttcaagaatgtccagcttgtaaccgattaaaccgtacaacagcgccttaaaatgtctcggtgcttcatataactctttcagttctgatggagaataatgaagctcatgcatcgcgtaatagagatacacggcttccttattcccatcttttatcagttttttgcttcttgctccagatcttctaattcatcttcaaaaccattgatctcaatcgctttattcagccaatttgcatactcaccgccgactgaaagaacgcgttttgccacctcgaccggatctgccgttttgtaagcgtcgcggagctccttagaccggaaatcagggtaaatcgtagattcaaccgcgatccgcgcatagaagcgctggctgtctaagtcttttacgcggcctctgcccttcacatttttatatgtcgtgctttccttctccagttcgtcaatgcgctcagtcgtaatggctttaaaaataaaaggcacgatgtttccttttttatcgacaaaacgctttgaaagcggaacccggatctcctcagcctcgactgttttacccggcataaagaatgacagatcatatacttgttcgtttttttcgctcatgatgaaaactcccttactctttttttataaaaaaacaggcctataaaaggcctgtttcactcacaatgattctggttaaaacgtttcagaaagcttttccggcacatcgaaatcttcaaaggtaaacggcacttcttcttcgagggcttctgagtctacgtccagtccggcgatttttgcagaatcaaagttgacgtcatacagggtgacgcgttctgttccgcggcctgatgatttgtcgtcaagaacggcttgcagcgtaaaatacgggtcgctgccttttttgacgtaatccatcataaggacggcgaatttggatgtgaccttatagaatgttgccgtgcccgttccgttggcgcctgttgttttatgtcccgtcatgcggcggcccatgatgtttacttctgatttgtttttttccacgtttgcttcaaaggttttaatatgcgccatctcttctccgtcgagaaataaacggccttcttttcctgaaatcgtgttttgcgcttttaatgccatcttagtttacctccacattaaagtagaatttttctgccgcatccacaggctgtacggcgagatcgattaaaaagccgtcgcggtcttcattcagcccgattgtaatgtctttgtctgaatcaaagttagcgatgccgcccgcatcctggagcgttgtcaaatattgaataatcatcgttttgacgaattgaaggccgtcatttgtcgcaggaagatcgcttccggtgccttttttcgatttaattaaggctttcagttcacgtgtcaaatcgttattcaccgcatcaagcacacggacgattttgtttttcgcgaactttttgtttttctctgccgtaaatgtcaccaatgagttgatatctttttcaacgctgactgacttatcacgggcatcataagagaaaaggaattcacctttggaaagacgttcgatcacttcatcatgagtcaagcggtgcagcacatcgacggcgccttcgtattcaacgaatgttaaggattgattaaatgcggcgctggcacttgcgcctgccacccaggcggtcgcatcttcagctttaatctcagttccgtcttccagcagcacaccttcagtcacattgataatgccttcataatccccgctgtaatgggcggtcaccccttgcactttctgtccctgcgcatcgcgaaggcgtttaatgaatgcggcaaatgtcgctttcagctgatcgttttccgcgacaggaagagcgatgacatcgaaattctccgtttcagccgcagctaaaaaatccgtatagtctgagttgaccggtgctttatcagttcctcccgcgagacggatgcctgcctgcgggtttaacgtttccccggattcttcctcagtgcctgtcagcgggatggaagccgacagttcgcccgttcccgtaaatgtgacatagccgtttgcttttaattcttcggcttttttcaccgtttgtttgtcaacttccgcttcatccatgtaagtggtcacatcgaaagcggtctgatcaaggacgttttcactgatgcggatgatgatgtcatttccttttgaacccccgtacaaagcggttgctttaacaccttgcgaaagatctgcgctcgctctgattccctctgtcagacggtacatcaaaacggtttttgctttctttttcgcctcacgaagcagaatcagtgacggatcttcaatactgagccccacttttttattcaaatcctcaacgcttgaaatggaaacgaatgttttcgcttccccccagccggatgcgacgggaagggcgacaatcccgcgttcaccgatcgatacccgctcctgggcggttgttttaaagttaaaatagattccggcacgttctttttcttttccttgcgtaaatgttccgccgttcattattgcatgacctccttggttaaaaatgcttcaatgtaagacttggcttgcgcttttgtcatttgtttttgcttcacgccgaataaagcaccctggagaatctcgggttttacgccgaaaagctccttcgcgtgctttgttaaatccgccgtgtcataaagaaccgctcgttccgccgttgcggcgtttttctttttatattgtttcacttttgtttcaccccgctgttaatgtccacatcccgcagtgcgggagatgtttgtttttgatagtagtagcggctcgtccagcggatggtgatcactgcctcgcctttgtctccgactcttgtttcgatacggctgatgcggacgaaatcaccggtatcctcccctgattccgtaagcagcggaatcagctgtcttgattctctcaccgcatcggcgatcccgtcggctgcatagagggcctgcaccgagtcggcatggaacagcttcacattcagactgtatgtcttcttaaaggtggagactgtgtcattctcgtcaaaagcatacgggggcgggatgtaaagtgacggcacctgaaattgttcaggcagttcattttcatatacgggcacgccgcactgctgatacaaaaaagcggcgattgaaccggtctcgcgattcatccgatatctccccccaacgtgttaagccactgattgaaacgcttgtccagcgattcggcgaagagtgtttcatacaaaagaagggctttgtcccaaaacccatttccgctgatccactgttttttgagcgccattcccgttgaagctgacggatcatagatgaaccgggagccttgaaaatacccgggcacccatctgacattttcatctgagacggtccaatgtccgtcatttatgaatgaggcatactctacattggtgccgatttcaagggtcagtcccccgttttcaatgatccatacgtgatcctgcgctcctttccggaaagaagacagcaggctttctgtatcaatcccgcccgaatgaataagctcctcccgtaccaagtcgagaaaatcctctcctgactgttccagccattcgcctgcctgacgggcaaattctccggatgatgccttttgcagcgaccgattccattgttcaaggttttttatgctcatagtctgtcatctctcacagcgataacctcccaatggtgctgtcttgttttcttcggcatttccagaatatacgcctgtccttcccaaatgattttgtcattgacacgcacaacggcctctttcggaaaatgaacgagaaaccgctgatataccttatgatcaggctcaagctgaataagctgctgctgtttttcaacaaacagacacggcacgtcttcataatcgggcacttccggataagaaaagacaggctggagcttttcggcgggaatcccgaagcgtccggccttcggaactgacaccgtctcatgataaatatcgcatctgtcagtgagcagccgttcgtagctcataaaggtctcacctttgcgtgtgcagaaaccggagaataacccggcgcgatatattcacagagcagatggtgcaccgccggttttctgattccgccttcacctgccaccgtatacgagtagtcgcctatcttttcagattgataggcggaagcggctgcttcattctggttgatcagcgcaaaatattgagaaagctttaataacgcaagcttaatcttttcgggaagcggtgagtaaacagggtcagtgaacgaatgccccgccattctggccgcctccgcctccgcctccagaatgtcctgtataagaagcggctccggcctgtttttgacttgatcataaactgaatatgaaacaacgtcagacggctgaattaacataactgccacccccgtcttattctttaacgtttacgattttggcgcttgcatcttcttcttcaaatttgctgtcaagtttagccgtcagtacgataataaatttgcggctgcgaatatctttatctacttcgattcggatatttcttgaaaaaccgagaatgatatttttcgggtgagtcaaaatgatgtcagacgcatcgtactgggaatcaccttctccgactgagtacggctgcagattggacactcctttgaccggaacgccgaatgctgaagacaaaccgccctgcaccgcaagatctcccagattggtctgacggtcagccacacggtctttccattcaatctccatgccttgagatgtgtaaaatctgaattcctgaggcagtcgcaaatattttgccggaatggcttttaagccttttttaaatgtggctctggacagctcttccccgtttccgtcaatgacgtgagatacagtctgcttacggattccgtcaagctgtgccaagtacggatcagaagaagatgtatcgccgtttacgactagctcctcaatatcgactgccgcccgctccgccaaaatctgcatgatcgtctgctgcaggccgtctttttcaatattgttttcaagcgtgtcataggtgatattaatttccgcaatgacttctttcgtattcagctgcaccgtacttgttgacgggacggtcagctgatcgtcagttaaggcttttccttcctcagcggcacgcagaatacgctggccgaaaccgattttttcaaatttctgcgagtcattttccatttgaatcacacgcgattcgctgaaaatggtcggcgtgttctgcaccatgcggataaatgctgaagcttgtgcggggttcattaaaccgccgctttttaaagcggaaagtgacatttccgcctttctgatgatatcttgatttctcactctacagttcctccttctgactgggcttaaagcagtccgctccaaatggattttttaacaggctcttgaccgcccgtctcttcttccggctgctttgatgcgcctcttactttttcaagcgcttcaatgcgtttaataatcggcgccagcatgtcctcaacaagtgttttcagcttttcttcatcagacggcgcagccgccccgtctttgtcttccgtgttctggtccaaactgtcaagccgctttaaaagcgggtgcagcgcgtgttcaatcgattctcttacgtcttcttttctcatcttgttcaagtcctctcccttgcggtttcttgatttgcggtcacggtcgagaaattgcttgactgcgccgaataagccggcttgcttttctgccggctcttcgtaaacgtcagcggttcccgccatgctgtagcccgtaatgataccggctttaatctgatcccatacttcatcggaagctttggtgacaagcacccaagatcctttccggatcacagcattcccgatttcaaagtcatccggggcgacgtacgactccaccacctcgccggtcccgccttcaaaattatgatttgtatcgatgttgcgggcgtccgccaaaaaaccgtgagcggccttttcaatctcttcagccgtcatataatcgccatgtgcatcggggacatccggctcgtaaacgatgccgtaaacaagcttctgctcatccgattcgttttttgtaaacacctgcacctttttttcaaatgacggaaggcctccggctgattttgtaaaaaagaattccgtttggttcgccgccttatcgacatagctcacaaaactgatgacggcatttctcaattctctcggcacgagatgttttcaccccctttcaggattgctcctatttccctttcagcaccggccggctgtagtactcttcaggccattcctcaagcgtcttgccgagcactcttcccgccagatcacggaggtcattaggagagaccgcgccggcggaaataaatggcgtaagcaccttcgcaatttcaagcggatcgcgaaaatcaggcccttttaatgtgagctgtacatcgtggagacccagttcaggcaaaaataacgtgttgagcttattaatcagcgttttccgctccggctgaaacacctgctcctccgttattttccgtgccgtatcggctgtggctttgttgtattcctgcgcctctcccgtataaagcggcgggagacggaaagcggaacggagtttatttctgcttctgtcgtcatattcaagaaacagcgcatcatcctgcagaatttccgcaagtgatttaatttccacagacacgggcgtaatgtcttcgcctccgtgaaggtctttttccttcgcaatgccttccgcctcaatcagcagaaatttgtgggcgttttccaccccttccaggtcattcatataatcctgaagctctttgtacgaggtttctgacagcatgccgttttcaaccgtaatggcggccggcacgtgacggccctgcttgaaatacataaaattcagttcttccgctttccgggcgccgtacagattgacgatattgccgacccagcgcggaatgccgtaagtgccgctgccgatttttaagtgaatggcttcatttgcccggtattcttcagacagggtctttacgtattcaccggttctcatgtccatcatgcggggatcgccgtattccttaaaaaacactttccgtccgttcagcatctgaacatatttacggaaccgtttttgccttttaatcgttttggatgcgccgttttcttcatatgaaaatgtaacttcaacgggatcagtcacaccgcagacgcgcatatgtttcacatccagatattcaatccccgccggttttcccgcgccgtcccgaagcacttcgagaaaaccgttgcccgttttttcgcggtcttctatcgcatatccgaggaccgtctcggccgattcatcaaaatgaagacatttgtaaaagctctccagcttcatccagtttttttcggcccgggcctttttagacggtgagcaatctgggctatttacatcaaaggtatattccacatcgaacccaaaacccgtaatattgacccgatacgcgtcaatgcactgctgaagaatcgtcgagtattcggcgattgttttcagttcaatgagattatagggcggtgaaatgatgtcttcgccgtacagatcggcaaattgatcttcgttcatctgccttgcctgcggcgcggccatttttgatttaaagacggtggctctaacgttttgatagttaggcaacgcctatctcctcctttcccgattcggacgtctccgtttttgtgatgcatctttcagatccgccgcgtcatagtcatccagcgcataccaaatggctgaaagtgtgtggggatcaattgaaaactcatcttccgacagaacgccgtttttgttttttgcgtacgttaagttctgcaattcgcggatcgtattttcacagctgtctgagcaatagatatgtttgaaccgtttcagcttttttgtatactgaagtcttgagcccggaaactttttggccgcaaccatgcaaaatccctgcctgcggaaatattggatgcttttcggctcagccgaatccgctttgatcagctctttttgatccgccaattcttgaagctcctcagctgtctgatcatcggtcattttgtttttgtaatactcccagaaaatataaagctctttttgatccggatcgacggctagccggatgaccgcattgtatgactcttcaaaaccgaaatccatgccggtccgaaacagggggcgcctgatggacgcaatccgctccgttacttcgttgtgctccatgacctgaaactgcggaaacacgcggatgccgttgacgccgaaccgtcctttgcgggcgatccggtacaaatcaggatcgtaatgccgtaagctgtccagctgcttaatatagcttttcggcaaaaacagattatcgcacgctgtggaatggtggtaatacgtatctcccttaacgacggtgcctttttcatacagcgtctgatcatccaatacgaaccgttttttttggtcatcacgaaaaaaatgccggtacgtccaattggaggtgccgacgggatttgtggtgcatatcatatgcagcgaaagctcgggatgacgcagacggccgatcagctccttaaagccttcatacttcacttcagagcattcttcaatccaaatcagtgaaatatgatgaatggatttcaatttggccgggttgtccatccctttaaacataatccggcttccgtttgaaaatctgagctgcatcggtgaagaaacggcctttacggcatgtcccagttcaagctccgtgataatgtcttcaaataaggcaaacgtagaatccctgtgcgtatcgaaaacttcccgcacgacaagggccgtccgcttttcacgaagcagcttcaggatgattttcagcgcggtatgatagctttttgacgagccgtagcctccgacgagaaattggtacgtttcattccaattgaacaaataatcttcaaagcgcgggttgaccgctttttcaatcatggccgttcctctttccgcgtaatgacaatgtcaatcggcttttggctgtcttctgttttttccatcttctgctgtgccagctttaatttttcattttcgattttttgtttaaattggtcagggaaaaggtcaaagtacaaggacagcttttcaagagccttcatcttgtccgcaagctttattgcaatgccttctttcccgagttttgcttccgtgacgatggttccgtccagaaggtgcgaatctttaacgtcaacgtagctgatctcctgcataatcggattatcattctcgtcaaagagcggccctgattttccgaaggcctgaacctctttttttccgaaggttacataatcggtaatgtcagcgaaagcgattttcacatagacttgaagaacgtccatcgcttcgacaaacactttattgaccatttcctttttcatgcggctgatttctttagcgactttttcgttttttaacagcctgcttcccgtcacatgcgcgctttccggtgaatacccggcttttatcgcagattgggtggcgttaaagcatttcacataataaagacaaaacagccgctggcgttcgtttaactcatcaccttcgcccgggttgttttttccgccgctttccgcgttctttttaagcgcctcgtcccagcgcccttcttttttccatctgccgattgttcttgcggatacgcctgatttgccggcaagggcgcgatttgtgatgcggcctttatgagactgatagattgtaaatgcctgttctctttttgcgtttttcatgctacggcatcaccgccacctccgacatgattgtctataataaaaagcggcttctaatcgggccgctttttgtgatcgtctgttcacttctaggtggcaaacgtatgacaacttatgaagcaggcgattgatttctttgttcctgctgtttttgaattttcagaagcgcccgtttgaccgtcgtttgtacggttgatttctttacattcagcaaggcggcgatccgttcatacgaaaagcattccgctttgtggagcagcagcatttctttttctctatccgttaaaacggctaatgcgtcccgcagtctgattctgtcttcttcagtcacatttgcggacggttcaaacatcagcgcctgcgaataggtttctatgattctcggatctttaatgagcattctctgataagcgtctctgcggtctatcgctcttcttatgccgggctgccggcctttttcaagccattcgatgacatattccaaatctgtaataatcgttctgatgatttttttatctttcagttcttctgaagtaaacaccgtttcatccgctgcctccagctgcttgtaccactttttcgtctctttcagcgtgcgtttatattcaaatagtaagtcttccatgtagatcctcctctttttcggaacaaaaaaggacaccaatcaatgcgcagcatgtgcgcgattgatcagtgtccgcaggctttccgtcttggacgtattctgtttttttcgattaattcaatttaaagccgatttcatattcgacccgggccagatccccttttcgcgtttcgacaagcgttttgccgtgctccggcgcttcggcgagccatgcttccttcttcagtccgtctactataatcacccgaaccttgccttcttccagctggctttttaatgttgtatgttcaatgtcagtcagttttttaggattcatgttttacttcctccatctttttcaaaatgttcacttcatgtatgaggcttccgagctcatttatgaacgcttctttttcttcagaactttctccccggagcaggcggagagccgtttcggccgcctcaaagagttccggggctttcgccatcaatgccgcgttgatctgctgtgagtatgaacttaagttgaaaacggccgcgatgagccttccgtttgaataagggaacttctctttatccgcttcgctgtaagcggaataaatgtaaatgggtttttcttctccgctgtgtacggcccgccatggagcggggctgtttttttcttgcaatggtgatcctcactttccatcagcctcatgccatgcttcaatttgcttttctatccgttttgccctgaacagcaggcaaaaaagccatttgatatatttacacacgtgcatcaagcctcgcttttgcgtcttgaaccattcgttcaagccgtttaatgaccggcgttaaatcagtgcctgttttgcagttcgggcaagggtgaaagacagcgccgaaacccgtttccatcacaatgaccttcttcggcccgcacagcttacacattatctcgccccctctaatctgtggtttacgtcaaatgaattgccattaatgatgactaaataatcgctgcacatctcataaattcttgtgcccaaggcttcatcaacctgcaccaatccgtcacaggccagctcgctcgagataagaaccggcttatgatttaaatagcggtaattcacgacggcgtacatttgttcaatctgccaatcggtcgcccggggttttccgttcagcggtttgaacagatcgtcaataaaaagcacatccgcctgtttcatacggccaagctttgcatcgagcagatcaaaatcattttttaaatccgtaaagccctccacaaaaggaaaatacagcaccggtgtctgcttctgtctcatgacataattgctgagagcggtcaaaagatgggtttttcccgatcccggacgccctaaaagggcaatgctgtttttccggcagtttttcatcttgtcgaagttctcaacatattcaagggcgcactcatatgcgtcgacgactgcctgaggcttgccccgcgtgataaatcctttgaaatccagcttccgaaaggcatctgtaatctcacttgcgccgagaatgcgttctactttccgttcggcggcgcagcggcacttaacccatacttccattcccagctggtttttgagataaccgccctgatctttacagagcgggcagtcaaagcggcttttgtctgattcttccggtctgtccgccagtaatggacgttttccgtttttcaggtcggcaagaatctgctcgatcgttcgttttgtcatgtatcgtattcctctctttttttgttgtgattgtccttcccgcaattcgtgcattcaagcggtcttccataaacttggcgcaatagctgaaagccttgatcgtttcagctgaagaggtgcgccgctgttcaaaagcggtaaagcattcgccgagccatttgattgcttcttgtgctgacgcaccgagggaaacaatacgggcgatggcctgataatcccggggcgacgggtatacgctccgcccctcctgtgcagaccttaatctgataaaatgggcagcaatgtcgttaatcgcttcttcagcagtatgattttttgttatatctatttctctccggacatttttgtcccggtgatccgccgatattgtccggtcagttgcttccgggcgggttaatgtctttttcggcgtgaatcttttcgagtgctttacggagacgatgagtccgtaaggggcgcggacggttttgatatactcatgctgttccaagctctcgagccaccgcctgacggttttttcgctgaccgcgaatacatcggccatttctcttgcttttacgggcttatgtccgaggacgatcccccactttacgccgtcttttacatgttcctttgtcgttgagctgatgaaccataaaaacagccaaatggcggaccctattttgtcataatgttctgaattcaataatccagaatagatgaaaaacgggtagcttttacgtttcataagggacatctccatttttcttcagacctatatagcgttcatactgcaatcggttatcaaatcggaataccggtagtccgcaagcggtaaaagatatcgaaccgcctgcttttcctaaacatctctggtcagccggattgctgctgaaacggatgattatcggctgcatctctcaccctcctgatcaatttcttatcgtattttgatacattttgtatccctatgatgttgattatatacgatacatttcgtatcatcaagacctttttgatactttttttatcatctctttcttttgatacattttgtatctataatcataagtaacttagggtgttgaaaaaagagaggtcatttcggatgataggcggaagattaaagagtctcagaggtaagaaaacgcaggaagaagtcgcaaatcatatcggtgtctcgcgcgccagatattctcattatgaaaacggccgatctgaacccgattacgacacgctgcaaaagcttgcggattatttcaaagtgtcgactgattatttgttaaccggaaaagaaccttcagatgaagacatgtttgccgatcccgacctgcagatcgcatatcgggacatgcaggacttttccccggaaagcaagcagcaggccattgaattcattaattatttaaaagaaaaagagaaaaaccgcaggccgaaacataaataatccgctcttttcctttaaactgcttaacgttcagccgatataaaagctgaatgtttatttttaaaagaaaagggaattgattcaaagtccgatcagggcttttctttctcgcttaaaaaagaacatatgttcgaaagggtgtattcaattgggcgattttttaacacatcttgaggaatacgtcaaaaacttatattgccgcatgggaatgaccgcccctctccatattgatatgcagatgattgccaaggagcttgacatttggattcattttgaagatacgcacagtatgatgctgaagcgggacggcatgtacagcatcgtcctgaatcaaaaaaagtcacccgaagagcaatggcaggattttgcgcacgaactgtgccatgtgctgaagcataccgggaaccattttcatatgaacaagctgttcagggaactgcaggaatttcaggccaaccattttatgtaccacttctgtgtgccgacctttatgctgttaaacatggagctgccccagcggaggagccacgccgttattttaatcgcagccgctttccgggtgacggcatcatttgcggaaaaaaggctcgagctgtttgaacggcgtaaagcaggtattcaatttcagaagcggctcgcttgtctgttatccgacaagcggccgaatgtgtattatggaagcggacagacacacttgcatgccgctgaagaaaaaacgccgtattttattgaaaattagcgattctccgccggcttagaacacagccggcagaatgtcatcattttgacatcggagaaaaggtttttgcatcatgacgctgtaatcaccgtgctgcccgccaagcacttcatgcgccgcatagctccagtgaatgtaagaacgggccccctgttcatttatcataaaaaccggccttcacggtttctacataccgaaaaaacagatcggttggcgtgtatttttctccccggcagccaaaattgctgaacagcgcgtgtctctgcgccgtgctcacttccaattgcagccccattttcctttttgtccgattgacaatgttgccgggatttaaccctgccagccgatcattcttctctgtcagctcggcatcaaatcccgcttcacgcagcagatcacaaatcagtcttgctttttccagatccgcgcccccgacgagtgtatttgcctttttcagatcatgatacccgtgaaaagccaatgcgtaatgatgggcggtcactttttctaaagccagaggctcgtcaaagcgtgtgcttgtcaagtggagagaacggttatcgcaccgcttcgtcccttcaaataaataaattgagctttggtcagaaaatgcatgcaccagctcactgacacccggctcaatcctgccgccgtggggagcgaggacgatacatttacttccctctttttcttcataaataattctgtattccgattcagcagcggaaagggctgcgaaattgtcatatctatctttcatgtgtaacatgctctccttttccagtcagcaccagtttactctactcatctgggaatggaaacctttttatagtatgatttgatagaatacgtatcagggaggagatatcatggggttcatcaacggattgctgggcaatgcgtcgacaatatcgacggctgaagcaaaatcagaactggcccgtattttgctggaaggcgagaatgtcaatgccgcatttaagcttgtccgagatatcattgtctttacggataagcgtcttattcttgttgataaacagggactcacggggaagaaaacggagattcaatccattccgtacaagagcatttccagattcagcgtagaaaccgccggccgctttgaccttgattcagagctgaaaatttggatttcaggcgcggaacttcccgctgtctcaaagcagtttaaaaaagatgaaagcatttatgatattcaaaaggcccttgccgcagtttgtatgtaagaagaaacggaagcccggggagcttccgttttcttgattacagtttttcttcaattttcgccttcgttttcgggccgtaaattccgtctgccgttaatccgctgacggattgaaaacgttttacggcatttgccgttttcgggccgtaaacgccgtccgccccatgattttttgctcctttatcgggataaaaataaagtgcggataaagcgttttgcacttgttttacgtttgtccctttcgtcagcggtttcgtcactttgatcacaccggatggaagcggatatgaagacacagcctgactttttgaagaagaacccgtctgagcgagcttgatcacttgtccgactgtaatgtgattcggatcggtgatatggttgatgctttgcagcgattttacgctgacaccgtgcgatgcggcgatttccgataaggtgtcgccttttttcacatggtattcagacgcggaagaagaaatagaggcttttttcgccggcatacttccgcttaatttcttttcaatcttcgccttcacttcatcccagcggccttcagacaaaatgcggtgcgggcagtactttccgttccagtcctgatgctttctgattctgtcaatcccccagccccgttctttcaaaagctgcgccgcaaacgcaatcgccagttcttctgcggctctgtaccgttcgccgcctgacttgctgtaacagatttctatagcaatcgacttgcggtttccggtaccgttcgtgccgtctcccgaatgccaggcattccggtccaacggaattccctggatcacttctttgtcatcaaccgcaaaatgatagctcgttgattcgctgtttcccgtcatatagctgatttcattagcggcggatgcgtcgtttgccgtgttatgaatggtaatatactccggcgtcatcggattcggacattttaacgcatatttatcagccgatacgagccgttttttcacttcaatccccactcttcatctctccttatgcctttttcatcaataggtggcattcgtaggacagataacttgagcatatcgaccctgcattcggataaaattggaatggacacgcatgcaaaaaataagacccttccaaagaagggtctttatgttatgtttggttgcgtgcggcaatatggaatgtgccgtccgcttggttttccaaatggctttcatggccgatcacctgtgtaaagctgaacccgacagcaacaagcagcaatcctgacaacagtttagatttcatatagacaatctcctctctggatttgtttttgggcgtgcaccattttttcataaaacgtgagcgctttttcaggctgtccgtgtttcatgtaaaatttggcagcgtcatgcgccaattcttccacatacggatacaacatgtgttcttccagaaaatcaaacgtgtgcctgacggatgcgttatccatttccttgccgtataacgcatgcaaaaattggaacagattgacaaacaattcatcattgtattcgcgggcgatactgagcccgaggcgatattgcttctctgcttcggctgtagtgttctgtttataaagaacctgtgttaatgagtaaatagaatgcggaagattatcgaacttttctgacctgcaaatggaaacggatgtctcaaaatattcggctgctttagagaggtctcccattttttcgtaacagtttccgagattatataaggctgaactgataagacggggattgccttcttgttttgcaagatctaaagcaagttctaagtggggcaatgctctttctggatactgcatgtcatcataattccctgcaataacgaattcacattggattctgcggacgttgtacgtctcatacgattggtacgtttcaagggcttgaacggcataactcatggagacgtaggtttgtttcaggttgtaaaaaatctcggccattttaaaagcaaactcagctttctcgatgtcatcagaaacgagtgcaaggtttttttcagcccgtttgtaatacatcatggcgtttaggaacattttctgtttaaattcgtacattcctcgaaaaaaattaaagtagtaatcaagcagtcctgtcagtttatactggttgccttcaatgtcttccaataattctgaaaactcaggctgagaagggtcctcctttaagggcttgatgtaatccagcatgacgcggtgtctgaattccattaatgaataatacagcagcagatcctgatcttcttccatatcctcaatctctctctctacttcacgtttgacgcgctccgcctcaaggacgtgaaactgccggatatgggtataccattcattaattttgagcccgacaaaagaggacggaatagtctgcttcatcctcaataaatccccccttttggaatgaccgagatatgtcatattttatcataattgctagaaaaagaagaacgcaaaaagaccgcaattgtcgaatttcggatatccgcaacgatttatctccatcacaagcttattgcttgtttcttccgtgccgttgatatagcatatccttgcagcttttattctgtattaaatgggggttttcacatgacagcacaaaatcaattggtcagccactttctgtcacatcgaaacgtgacgattgagctggcggaaaaaatcagccgcgagcattacgactacaagccggcggagacatcaatgtccgctcaggaacttgtaaaacacatcgtttattcttttcttatgtttgcaaacgtcattaacgacggaaacgggtcagctatccagaacaaaccgaaagaagaagcggaaacagacctcgtcaaactggctgaagcatgtactgaaaaaacgacagacatcctgtcacagctgactgaagagcagctgaaccgcgaaattgacctgactgcctctttcggcagaaaaataaccggcgcggctctccttcagcttgccatggagcatgaaattcatcataaaggcaatcttttcgtgtatgtcagagaaatgggccacacggaacttccgttttatcagcaaaaatcataatccggccatcatccgccgatctgcgaaataacagcaggcaggcggattttttgttctgtataaaattttccgaaaatttaattgattaccgcctcttaatcatatataatctgataaaaatagtaggattattcaggaggcacacagatgactgtaagcattgtgtttatgggtttctttgtcggaacgctggtcggattgacgggtgtggggggagcggcgcttttgactcctttactgatcgttttggggatcaacccctcaatcgccgtcggcactgaccttttatataattccatcaccaaactgttcggtgtcgtttctcattggaagcagcgcaccgttcaatttaaacttgtcggctacttggcgctcgggagcattcccagcgcaacagccgccatcggtattcttcacttgtttcccgcttttcaccagcatcaggagcagattatcaaacaggcgctcggctacgtgctgacccttgtcgccatttccattatcgcccgcctttttttcgataaaaaactgcggccgaaccgctggcagcaaaaaacacttgaagaaaagcggacactcatgatactgatcggcgtcattttcggcttcatcgtcggcctgacatctattgggtccggctcattatttgcgatcgccatgttatacctgttcagaatgaaaacagcagaagtggtgggaacggatatcgcacatgcctttttgctcgtaactgttgccggtctgttaaacgcaagcttcggaagcgtcgattacctgcttgtattgaatctgttgatcggctctgtgccgggtgtgcttctcggcagcttcttttcgccgaaattctcaccgcgcccgctgcagtttgtgatggcggcgattattttaatcagcgggataaaattaatctaaaaaaagcgtcctttacaggatcgcttttttatttgggaaatccccctcaatccaaagccaatggggtgggaatttctttattaactaaccttaaaagtgcatataattgtccggttttccctaacatcataccaagtcccgaatgatcatttcttattccattttgccagccatttttcaacagggtctctttaaaatggttaacccatatattaattgtattctcaatctcttgcttgcgatttttaaagagagataattccttaatagcgtgaagtacatctatattccccatcgttccatggcataatgagtagccctgacgatgggaatttccattcagcaatgtgtcatctaaagactcattaatatacccaacgtgaatgcgcccgtctacattctcgtatatcctgcttcttccaagaagaataccgcaagacccgtgacaccacattgcggaagaataatccgactcattttttctgttatccctccatttttttattttagtatcaaaaaatttatcttcgtatttgagagctgattcaatcagtctaagtacttctccagatgcctcaatatgcgcataatattcagatagtgcataacaaatcccagtaataccgtgagaaaaccctgctaaaacaacattctcatccgcgtcggatttccaatatgcttcatttctattttgaatcattcttttgcatatttctttacaaactgcccttgccgtatcttccattaattcagtccgataatacctgccaagctgaatcacaacctttaatatacctgcgagtccgcctataaaatcggtatgtgttatttgagcggtttcctgacgaagtttctctaagtatgctttacacatactattcacttcattttccgaataaagtccggtacctctcattttattgacaaaatagatataagaacttgacccgtaaaaagcagagaaatttgttttataaatactatgctcatatatttgattaattgaattcactattttacgaagaatcgatttgactttttcatcattataaataaaatcataagctgaaaaataaagccccactccagctaacccatcgtacagcccaaaactcaacggtcctacggataaggtgccattgggagccgagactattgatacccattgaagatatttctccgattcgattgcttgttttaatatacaatctgtttctatttgaatcagctctttgatttgtatgtcattttttaaatatccaggtacaaaatcatcaatttgatttttataaataatatccaaattagccgccgtggagcttaaggccatatttatcaagctcacttgctgatgcatgtcttcttccgacatattcgctaaacgagttaaaacttcttgtttagcgctttgtttcataatccctgtatccaccacatgtattgaatttgaataaacccttttttcactaataggagcattaaaatagggtatatcaccgatcatcatatccttgatctcaaatggactgatggaatcaaatacttcatattttgtataagcatccttaataaaagataaaacccttatcctttctccataatcttttaaatacataggatggaggagggtttcaagaaatgaagcgtaaacatatgtaggtctgacaataattctaataggggcataatttaattcgcttataaggttccgtatatataaatcttctttcaaaatcaagaatattcttttgaagccttcaataaattctctttcaaattcaaaacattctgctactttatttttgtaaacaggaagattccttccccttttgaagagatattgtttctttcttatagaaattttatctgtttttatatgaagcacttcttctttttcacctttttgattttctgtgtttatcaagcctcctatattagtcagcccattatcttccggaaaactcatatagttaaaaagtgcagattttaatattgttttatttacctgtgctgatgccattaaattaacattttccttgttctcctcagaaaaaaagaggctgctttgaaacagagtctcaagatcaaccaacactggtttatcacgacatgctatgatattttcaaaatgaaaatctgacccttgaaaagcataaataaatcctaaatgcattccaaattggtaataataatttcttacctgttcaatattatcgcacggttcagactgtacatactcttgccacccgtactcaccttgatccaaggataaaggtgtttttaaattagtttgataatactgattgacataatcaatgaccttttcataaaaaacatcaatttcaagtgaacggggtttataaacgagtttgttattctcaaattcaataataacaacacttttaccgccattatgaacatcccctgcattcatattaacctttctcatttttccgaacgaaaagttgaatttttgttggatttttttatagtcattaacccaatgtttaataatagatatagtgaagcgtataaaatcagaggtggatctggagattaaatcttgcaatacaggataattattgagtatttcttcaacaaatgcggagtttttcagcctttctgagaatatatcataatttttagattcatttttttcatcaaactcgtcaaaagtttgatgaaactcatggataagtgttttccccgccaaatagtatatttttttcttataattaattaatatcgattcaacaagacatcccttatccaacagactttcggatggtattctatctatttctttaacaatctgagctttaaaaatacttatataatactgcgcaaaaccttcgaaataatcctcttctttaaaaatattcaacatagagttttcataaacatagttagccgaattctgtgttttgttcacaattatcacttccttatatattcttgactgtctttgacaaaaaagaaaaagaatatgtacgcatatacatattctttttcggatatgtttaatcgttacatggactgacaatggacgcacactttgtcgtcggacagcctgctaaagagattggtattgtgatggttgtcggcgttacggtcatcggggttgcatctgaaccccctgcaaggttttttaattcttcttcagtcattggagtcagtgcttgaaaatcttttttcatgttaattcctcctattgtttgagttttttataaatttcagtcgttacatggactgacaatagacgcacatttagttgtcggacagcctgctaaagagattggtattgtgatggttgtcggtgttacagtcattggagttgcctccgagccccccgccaattcttttaattcttcctcagtcattagttccaatgctaaaaattcttttttcattaaaaatccccccgattgttttttatacttgcctttgcggacatgcgcagcctactgtgatagttggacaaacatgatttgttattggaattgttgttattgatactgagttttgccctccaataagctctcttaattcttgctctgatgtttcatacaacgcgctgaagttctctttcatattccatatttcacctcctttcaagttaataagtctgctggagctgtgattcatatttggtcttaatcgtctttaagtttccattttcaatctcgtagacagattcggagaattcgagccattcggttctatgagtaatagaaattacagtgatatcctttttgtaaatgttatttaatatatttaattctgtatccttatccaaattgcttgttccttcatctataaatagaattcgcggatttttcgctaatactctggctattgagattctctgccgctgtccacctgataaggtaataccattttctccaatcatggtatgataccccataggcatttttataatatcctcatgaatacatgcttcttttgcagcttgtacaacttcttccattgttattttttcattgaaatattttatattatttataatagtgtcattaaacagattgacatcttgaacaatataacctaacgtttctctcagcttaaccatattaacgtcctcgattttgaattcaccgtagcaaatttctcctgctgttttttgataaaggccggcaatgattttaatcaaagtagactttccgcttccagtttttccaattaatgtgattttttctctcggccggatcattaaatttatattattcaaaatataatcgtttccgttgtagctgaaatcaatatttttcaagctgatattatgagcggccgggttaaatagttcaatgcttttatcatttacttcctcatctttttcatccagtacagcctcaaccctgtctaccatttcttcaactaatttaatagactctaaactgccgataattgatcccagcggagacataaaccgtccggcaatgttagaaaaagcaattactgcgcctagcgtaaggcctatagatactgctgaccaagtacccacaattaaaataagtaatggcaaagatagattgattgcattggagaccgcacccagtaaagatgaataattcattcttttagagaaataatctaactgatgattaaagttataatttaattggctctcaatattcctggtttctcctattgtttttataaatgtcattgatcttaagatttcgattagctggctctgaaaattggattgactatttacttcctgttttgtgaacatttcaattttcggaagcaaaattttagtactcatcacctgtatagctgctcccaataaaactataaaagataatatcggagaataaacaaacatgactatgaaaaatacaaatataagactgatatctaatatcaaagtagacgctaacctggaaatgacttcacgaattacagcaatgttatggattctagttgaaatatccccggcagtattcgcctcaaaaaactttaatggaagactaaatattttatgaattattttatcagtcatactcttattaatttttaattgcagtttgataataaatttcattctgattaaggacagactaaagaataatacgattgaaacaattacaatcatgaaaagcattggtatgggaagaattttctcatttccgtcaataaatgaatcaataatatattgagtcaaaaaaggggtcattaagtttaatgcttgaaaaataaaagtgaaacttataataacccccaacaattttttatctttcaaaagatattttccgatctttctaaatgaagacacatcttttaacgacgaagcagtcttatcctttctctcaagttcgttctttctgattaacataatagaaatgccattatagaaggttttgaactcttctaatgtgattgtcagtctgccagacgaagggtctataattttaacgttatctgtgccaaatgcgtcgacaactacaaaatgattatgattccaatgaacaattagcggatggtttttatttaactctttaagctgcgttatattgtctgtgcggaatgctttgaaatcataatcgaatgtttcagaaatccttttcatttctattaaatcagtgccgtctcttccgataatttctttatttaatttcaatttgttaggattgatttttattccctcagccctgctcaaaaccatggctaaacaagtaataccgcaatcaaattgatttctttgaagaataaccggaagctttctttttctaattttcataaatgtctcctaatgtatctacacgtcctatttcaagattgagaatattcggcaattctgcgtctgctgcatacagcattccatatacgatccccgctaaaccaagcattaaattaggtgtttcaacatcccttccaactccgcattggtagaaacctatatttttgtcttgtacactctccaaaatcaagttttttcctatatttacaaattgactttcaccagtcttttttccatattcgatcagtattaaagcatttcccatgtctccgtgacaaagactttgctctcggccaaaaccgtcataaaaaatgttagaaacggttttattcagatcttttttggccacttcggcaatatcagggtgttttgaatctttcaattctaatctgcttaatagaattccaggggatccatggcaccatgcagatgttgcagcttcatttaccgtttttctcagatcaagccagttaccgtttactttttttgaattttcaaaagcaagtccttttcggatgtacatacttatatcttgatgttttgaatgtttctcgagtaattgaagggcatatatcattccagcgtttccatgggaaaaacccgttaacggcttatttgcaataccttcccaagtgacaaaatcctcatcaagaaagatcgcttgtttcattaaaaatgaaccgcattgttcagccaatgataaaaagaatgtatcattctctatttcaaacgaacgtatcattacaataagagcccctgctgtgcccccgattatatccaattctttatcataaggaagcaaggacggaataagctgagcgatttgttttgcattctgtttatatttttcgcgtttagtatacatatagaaattcattaaagtatatactattgaagacactccggaaaaagcacctacagacatactgctgtcttcgtccggtttcacctcaatatcaataaaacgagagatgacatctttcataattttttcggcaatgtccagatacttttcttttttcgtgacgcgccataaagccaggtaggtgaaagccatcccggaaagcccgtcgtaaaaggtatcacccataacggataagttccattgaatttcatcaactccaataggagtagcgttaagccaagaatacgaacttcctttatctgtgtgtgctttgtaagattgattataaatataagcggccaattcctctgctttttctattaagatactttcttggttactactgaaaacatttacatattgtcctggttcttttgttataaattctttcaaaacaatttgccgatcatcctccgaagcaagcattgacagttcgataacatagagctgaaactttaaatcgtcttttgataaatttgaaattctttcttttacactttgagctggtgtttccggaaagtaattttcaattttcttattttttgagcttagtaagtctttctcattcaatttcactttgaaataaggtatatcattattaattaaatcgttgaactcatatttaacaatagattgatattcatcttcttgctttggtctctcccatatttttgataagaaaatttctctatcaatagagttgtgtaaaaatctaggatgaaaacttaattctaataaagcagaatactttattgtcggttttgatataaaccgaacatatatcttgttttcgctcttttctattatgcgaatcagctccgaagcatgttttaatatagtcatatatgcttttgaaaaaccttgcttcagttcttcgacataatcttttgcatatacaaatttattctcaagcatagggtgattattagctgtatcaatttcgacatagtctcgtttgacagacatttctgctgtctttaaattgataagctgaggaactttaatgatcgactttgctttccctttccgacctattccgctgatgtcggctttgcccgcaaagaaaaaaggaagcagccctaatgctctgacagattcatgaagctgcgtttcagctttttcataagcgtccatcccatccttttttttctggtatgcaggatgaaataaggattccaaatcaatgagaactggatagctgccgttggcaatgagattttccgaatgaaaatcaacagctttcaatgcatataacaaaccgatttgagctcctgtacgctgataaaagttttgaacatcttttaaacaattgcatgctttaaaagatataaattcagtccatccatatccgtctctgctaaggacattcggagtgctcaattttatatcatgatctctaattttctcattcaaaaattcaattatctttttatataatagatcaatttctaaacttctcggcttataaataagtttaccttcatttaatgttattttagtaacctttctcccatcagaatgagaatcacccatccctacttcaatgtcccttattttgacttgttctgaaaaaccaaataaagagagcagttcaggcttgtccttttcaaaacgggagataaattccagtatgaattttttgaattttctcagttcatttccaatcgctcttaataagactggatatcgttggaaaaagttttcaagatactcctgactgcacaaaagagttttattataatcaccatatttttctttaggagtctcccctgccaaaaaacctttttcccgattcatattcatatccaatacaagtgttctataggatacttttaaaatgattttttctaattgatttgaaatactatgatgaaaaagagccggttgttccagcagatagtcataagaaggaaactttgattttttaagtagatcattgaagtaagaggacacttttaacgcaaaaacgtgaaacatgatttcttcatttacgtcttcttttttaatagcttggtgagcgatccctttttttaggttttcgaaaacatgaactgtaaaagcggatttatgtagtggggtttgatataagcttttcactttatcaattgattgaatggataacacattataaatgctttcctgggccatttgaatatcattcttatagattagttctaagtttcgatcaaacagtttctcattttcatcaaattgagagacagcagcttttttttctttacttaatagaatattagttagcgaattcatttaatattcatctcctttaaaaaaagagggagacagctggatctcccagagcattggaaatctattttcttatttcgggttgttttaacaccagcaagtgtgagtaggacaaagaccgcattcccaagttaacgtacaaagcttaccatcatttccttgagaaatccctcgctgttctgcgcctcctcctccgctgaattcacttaaagaaatttcctcaagttcttctcttaaatcaccggcaaaacgatacattttctcattcattaatattcctccccttgatttttgaaatatattggattttgatccatatatttctataaacctatgataaacgatcttttacctataggcaccgaaaagtcatattcggaaaagcgctttttttttgcgcgtttccgaagtataggttataaagaaaatcgggattaactgttccgttaatcccgattcatttactcatatatagttttcatagaaattaatgaatatcgatttgctttgatcagtgcctctgttctggattttactccgagcttgttgtacacaccagtaagaatgtattcaaccgctctttgactgatcaacagctttgctgataattcccggtttgtcattccctccgctacgcccgctaagatatcttgttctctttcatttaaagtaatatctcttattctatcttcaagcttatcaatgttgaacgtatttgcttctgttcttcttaattgtttaaagagatgagtaggaataatggtatctccctcaatgacactttcaattacttttatcatatgttcttctgttgatgacttacttatgaacccggaaacaccaacttcaaccaaaagattgaaatgcacagagatatcaaaaccagtataaattataattttttgatcggggctctctctaagaatcatttttgacaattccattccatttaactccggcatatataaatcaagtaaaattaagtcatactcataatgcttaaggtgattaagtacttctttacagcaagacaatattgttactcccattttattgcttttttcaagaatggcttttgtcccttgagcaacaccaatatgatcatcaattaatagaatctttatcatgtcagcgctccctattcatttttcgtacttatttcaaaccttaacagcaatccttcatttacgcttgaagatatattatgaataccattcatacaatttatccgctcttttatccctgtcagcccaaaactgtttgtttttgaatttactttattccaatcaatgccgattccattatcttcgtaaacaaacataagacttgtttttttttgaatcatcgtcaaaacaatataactggcttttgaatgttttacagcattagtaagcagttcttgaacaatccggtaaatgtttattgtgatatcttctgtaaaaatagaatcatcttttacatctacaaagaattcaatatcaagctgatagttgcttttatgtttatcaatcaggacttgaatgcttcgaagaagtcccatctccattaaaaaaggtggtcttaaatcaaaacatttttctcttatatactggatattgtccagcaaaatttctcttatgtaataaatatccttgtatttctcaacatgatactctaattctctgcatacaaatatcagctcttgaatgatagagtcatgaatatcctgtgcaagcttggttctctctatttctgaaattgaaaataaaaccttagaaagtacagccgacttacatttatgttgatcgtctatgataatttcatcaatttttttttgaatcaataatttgttctgaagtgcagatgctgtgcagaatgccagcattcgcagccaatctgcctcgttttcacgaatctttatagggtgtccttcatgtgataaatgaataaaaacaaatgtatcacacttctccccgataaacagaattgatccgctggcggtttcacgtatttctcctatcttaaaatttgaaatgtttatgttaggaacttgaatgtttttttctctcaattttaatgtttttttgtcatagtttataagagcaatctgctttcctgagagcacactctgtatttcattggttagttcttttatcaattgatctgcatcggatcccttttgacataattctgaaaaacggaacaggctgcgaagatatgtcttatttctgtcatcataggtaaagcataaacaactactgccgaatatacttagaacaaaaaatagactatactgtttaaactgtaattggctgtctgttataagcaaaagcataaaaaacaataataaggagaaaacaaaagcccttgcaaactgctcaatattaagcttcacccaattatctttcatttgtatccaagccccttactaaggaaaataagggaatccctttgaatccccttaaaatgaaaaagttactttacacttattaaaatataaacagcaaaggcaacaatgtataccagaaatgatccagtcataaattttacaggttttcttgaaaagtttagtacgcctcttaatccgtcattcaaaatcattccgaaaaaggtaaccagtgtaactcctaaagcgagcattgaaatcacaaaaataacttgctccatgtatactcatcctccatttacattctgttttttttcgaatatacgtataatcctgataaggataccaaaacatacagccccataatcagtaatccccaaactaaaagaattgaattggtatatcccatatcactttcagaaatttgaatactgaaacgataaataaaagaaaaaggaaagactattgagacatcacttgctaacagtatcgtcattattaaaaaggaagctacaccggttatcatgacaaccactagatttttacttaagaaagcaattaaagctgcaatcggaatggttagcaggctcaaagtagtagaagtaaaagatgtcgctattaatcttaataagtcgcttgctgagatatcttcccgaaaaaagaaaaacaaggtggataagtgaataatatgattaacagctgagattaaaaacaaaaatagaaaagctgcagctagctttgataatatcaatttgaatttatgatacggatatgacatccaattcaacattgtcctgtttttaaattctaaataaaaataaaaacctgaaaaaataaaaataatagtcggaaataggatcgaatactgattaaaaacaaacatataaaatttgttccaatctgtattttcgttcatagtcaaaagaccgattccgtttatgagaaatggcaaaaagcttagaaagaaaataacataaattgatttcagtcttttaagtttcagaaactcgttacgcactaacagactcatgacctttctcctttgccagcagttttaaataaagatcttccaaagatagcttaaatccgtcaatagacgccttgttaaatccccaagaatttaatttctctttcatttccgacggatgaattattgaaataaactcgaattgctgtttattctttgaaataacatgatccgcaaatttctcaatatccgcccaattaatacccgcttcagctggaattttgtacaaataaagatgttgcgtatttttcataaaggctgactcgaaaataatctgccccttattcataataagcaattcatcggccatgagattaatctcacttaaaaggtgacttgaaataacgactgtggttccatttttcattacctcttggatcaacatttcacgtacttctttaataccatatggatctaaaccgttcgtcggctcatccagcaaaagcaatgcaggagcatgcgcaactgctctggcaattcccagcctctgtttcattcctaatgaagtttgcgaaaacagcttatctttatgttcaaaaagtccaacctttcctaaaatctcatttatttcttcatcagaagctgatttttttaaatagttaagatgtaatttaatattctcaaaaagattcaaattttcataaaagccaggaaattctataatgcttcctatagactgaatcacatcattatttggatttccatataagtcatccccctcaaaaatcacttcacctgaagttggaggaaatatccctaacagaactttaagcaatgtcgtttttcctgcaccgttgggacctaataaaccatatattttacctttttccaatgttaaatttatatcatgtaaaatttctttcttttttatagaaacattgatacccttggatattaaagctggatcagcctttcccacttttcatcattcctctccgtcttgttctgtttataatataaacttacgaggttaaaaagaagatatagtcaaggttaatttacgtttaaatttctcaatataaaaaatacgtgaagcctctacggcttcacgtattcattgctgtttggataaataataaaaaccgttccgttttgattgctctttattttatgttcaagccccatttgtttaagcatcatattaatgatcgataagccgatcccggcgccttttctttcagatttataattcattcccgggcccctatcctcaattatgattacgggtttgttttcaattagctttgtctgtacggaaacgtattttcctgaatgagcatggcgcaaaacattttgaaaaatgttatcaagaattctcttcagccaagtctcgtctatttcccatacgatgttttccttcagatcaatatctattgtgaagtgctctttctcaaaaattggataccaagctgttaacgaagaacgtattatctttaatatgtcacaactctttttatgaagcggcaatttacctgcggcaagaagagaaaatgatgacaaattgtcaatcagttcgcccataaacgttattttatcgtttatgatgcctaaagaatgctttccattttcactgcttatttcattcttcaacgtaaatgtatgccctcttataaccgtaagaggggtccttaaatcatgagataaatcagcaatcaagttttttcggatttcgccttcttcacgctctttttgtctgctgttccttagttcctcaaccatctggttgaatgaatattccacttgacccagttcatccttctgtttaactgttacaaattccggtatgccgtcattatcttgttttttcatatgattccccaaagaaattaaccttttttgtattttcgcaaaaaacatccatgaattaatcacaaaaagtgaacagacaaaaatcaaggcgataaaccatatataggaatacttggccctcataacctcccattgagatcctataattgagcgcggagtttctaaaaatgcatatccgctgtcttcactcccatttacataagcactcagcaataaatatttcttttggttttgttccatcaatttaatcaattcgctaacgtgaataacctcaccctttttggccaaccgttctgagttcgaaaacatcacctttcccttatcatttatccatacaatatcagagtgtttatattgcttcatgtgcgggaaagcagacgtaatttcccgattggatttccctgaaaaaccttccacatcagacttccaatcactttccaacttgtttggttcatagtgtacttgcccctggtgatcaatcaagtatgttaatgtgacatagtaaagaaaattcacacctaaaaaggctatcggaaaaaacaaaattgaggcaacgatattaataaggtattttgttgataatttcattgtttaatcctgtatccaatccctctgatcgtttcaagaatttccggctcatttggattgatctcgattttttgccgtaaatgcctgatatgtaccatcaacgtcttatccccttcgatataaggctgctcccaaatattttcataaatttgttcctttgttaatatttgattgggatgtctaagcaaaagcaaaaaaatccttaactgcttatcagttaaaaatatttcctcatgactttgatgatttaaaattcttttttctttcaagtggacacttaagtgttttagcttcaattcatgaatggcagtcttgtcaaatcttcttaataatacttcgattcgagcggccagttcatcgggatgaaagggttttgtcacgtaatcatccgcaaatcctaagcctttcagtttatcttccagacccgttctcgctgttaaaagcaagagcgggatctgcggatgtgtttttttcatcctttgaccgattgtaaatccatctaaaccgggcatcattatatcaagcacgatcagatcagccttttctatatatgtttcgtaattataggaagaagtgagccatataatcatatagccccgatcttctaaatcatcctttacaaattggccaatttcttggtcatcttcaatgtataaaatgttattcattaggaccccctctgaaatatgtgactaaaaaccaatcttccataataattatatatattataaaaatctcctttatgtaaggcaccattccattattatagctcatagatattcacaattcatcaaggggcaaaacgataagtgaatgcgaaaaggcggtctgttgtcagatcgccttttcccttataacgtcacaccggacttaaagattgcaagctcccgaaaatcgtttttttcgttattgacgtattctccgcttgcaactttaataatgtattgaataaaatctctcacaatgtgatcttctgttgtttggtcttccgccaatctgcccgcattgtaatcaatccaatgaggttttgattgaaataaatcggtatttgttgatactttcacagtcgggacaaatgtgccgaacggcgtgcctcttccggttgtaaacaacacgatgtgacagcccgccgcagcgagcgctgaagaagcgattaaatcattgccgggcgcactgagcagtgtcaatccctttgttttcagtgtttcaccgtatgtcagcacatcagaaaccggtgcaagaccggctttttgggtgcagccgagcgacttgtcttcgagcgttgaaatgccgccttccttattccctggtgacgggttttcataaatcggctgctcgtgcttcataaaatattgcttgaaatcattgatcaatcggactgttttatgaaacacttcttcactcaccgcacgctgcatgagaatcgtctcagcgccgaacatctcaggcacctccgttaagaccgtactccctccctgtgcaatcaagtaatctgaaaatcttcctaataaagggtttgcggtgatgccggaaaaaccgtccgacccgccgcatttcaatccgatgctcaattctgacaggggaatctcctcacgtttatctccctttgccgcaaggtgtatctctttaagaagcgctgtccccgcttcaatttcatctgtgacagcctgtgattcgagaaatttcacccgatctccgttcacttcagaaagcgtttccttaattgccgccagctcattattttcacagcctagccctaaaaccagcacaccgcccgcatttggatggcgaatggcgttaatcagcatttgtttcgtattctcatgatcatcgccaagctgggagcagccgtattggtgctttaaaaccagcacattgtcaaagggggcaatgtctttcgcctcttttacgaagcgctgcaggattttctcagcgacgccgtttacgcagccgactgtaggcacgatccacagttcattccggacgccggatgtaccgttttctcttttgtagcctttaaatgtccggttctcatttgtaaaaggattgtcctcgaagcgcggtgaatacgtgtattcttgcacatcggataaattcgtttgcagattatgggtatgaatatgctcgccggccgaaatccgccttgtcgcacgcccgattgaaaaaccgtatttaatgatgctgccgttttcttcaatggtttgcagcgcgattttatgcccccgctttacagggtccttcacttcaatcgccagtccgtctgtatacagccgctcccctttgttaaaatggcgcatagcgagaagcacgttatcgtttttatggatttttatgacctctttcatttcacttccccccttattgccgcagcattcatgtaacgcatgcttcatcccccgcttatgaatgacagagagaaaaaaagccgttcgttcagtcagccccggaagatggttcagattctttccccacaatcgctcttctcctaatatagaaaatgccgcttgaaacatatcatctttgcaacgggaccgcgccatttgaaaacggttcagaacctcctcgccatctgccggtttgttcagcccgttccagtatgaatagatcatggcgctgaatgaaaataccagcctctcaggaagccggccctcctgttcgatataagccttcagcgtcggcaggtttcttgttttgaatttcgcggcggcgttaagggtgatgctttgcagataatgttggatataagggtttttaaaccggtgtaacacatctgccgcatactgggtgacaccctccatttgcagcacgggaaggatttcttcattgatcagctcttcgatgaatctgcccgtcacctcgtgctcagccgcttcccggacggttagcagtccgtataataaagccactggcgccaatgccgtatgagcgccgtttaagattctcaccttttttgtcctgtaaggcgtaaggtcagacgtgatcagtgcgttcagcccggcatcagcaaaaggaagctcattctgaagctgttccggcccttctatcacccacaaataataatgctcaccgaccacaagcagacggtcttcgtatccgagaaaatcggtaagttcttccgcggtatcaacaggaaatcccggaacaatccgatccacgagggtattgcagaagatgttcgcatcatgaatccattgagtaaaatcaggctccagctcccacagcccggcatattgaagcacggcagccttcagtttccgtccgttttcttcgaccagttcacatggaagcacaatgcaccctttctcggcgtcacccgcaaatgccttatagcggaaataaaggaacgccgctaatttcccggggaatgttttttgaggcctatcctcaagccggtcgcctttctcaaacgtgattcccgcttctgtcgtattggagatgataaaacgaagatcctcttgtgctgccagccgtttaaaggaatcatagtcagaaaaaagatcaatgccgcggctgatggatttgacgatcgtgtgttcttcagccggttttccgtcctttatcccccgcaaaaaaagcgtaaacaaaccgtcctgttcgtttaaacgttttattttctcagagcctctcggctgtacggcgacaacgcttccgttaaaatccgtcaattgattcaattgatcgatctgccagtcagcgaaggcccgcaaaaagttgccttcgccgaactgaaggactttttcaggatattgaatgtattttccgcacatctttttattcagctgccgcaagctgtccgcctccttatatttatgcacacgttaacattctcccgtacaaaaacccggataatcagacgggccgttatgtgagttttttaattgaatctcttatcatcacctcggtgttttcgtatattttttccgccgccgtatccgggtcggtgataagcgccaaaattttctctgcgccgagtatgctgattttttcaaccgggcgttttactgtcgaaagcctcggcgtcatgtattgggaaatgccgatgtcatcaaacccgataacggaaatatcttccggaacgttcaggcctttggcgaaaatggtattcatcgccccgatcgccatatcatcgtttgaacaaaaaacagccgtaggcggtgattgaagcgccaaaagtttttccatcgcctgactgccgctttccatatcatagcggccttttacactgtattcatgcttaatcgggatagaatgatcaattaaagatgtcaaatagccttctttccgctgagaagctgacctgaatccttcctttccctcaatgatcgcgatatctctgtgtccgtttgcgatcaggcagtcgaccgcctgtctggagccttctttatcgtttgacaggatattcgtgatgctccggtcatcaatgtcccggttcagcacgacgagcgggatgtttttctcgcggatatgataaataaatgaattatcactgtcgctttggctcattaaaatgattccgtcatatctcatgggcgtaatggtttcaaagcttttcagatcgtcaatcgcgcggacgaacaaattgtattcctcactgattgtgcggtttacacctttgatggtatcggaaaaaaagctgtgtgaggttccgtttgtgatgcttgtaaaaaacagtccgatcgtatgggacttttgcatggcaaggctttttgcatttacattcggtgtgtaattcagctgtgaagcgagctctaatattttctgttttgtatgctctttaatgtaggggctgccgttaagtgcccgggatacggttgtgtgggatacgttggcgagttttgcgatatcttttatggttaccatcgtttttcctttctttctgtatgctgtcatttatttctattgtaccattaacggacagtccataaaatcactaaagttgaggttttgcatgatgtaagtcctgaacgagctcgtcatgctgccggtccgtcagtttatacattaaaccgataatcagcatggcgcacgctaaagcgaaagccgggtacagcagcagaagccctttaatcccgattaacgtgccttttgtctgagacgcattcgggatatagccgataacgctcagcccgatgcctgaaagaaaacctgataaagattgggcgagttttctggagaagttgaaaagcgaatatgtcgtcgcctccttccgttcacccgtcttccactctccgtaatcaataatgtccgacacaagcgcccacgtaatgccgtttggtatactgatcccgataaaagcaatgctcgctaacgccgtaaagatatatacatttgacgggagacagaaattcagcgcatcagccgcggcgctgacggcaaaaccgatcatcaccgtttgcttttttccgaagcgtttgacgagtttcggcataaacaacacacctaaaaatgaagagccgatgatgataaaactcatgtaggacatcagctccgcattgttgagattgtattgggcgaagtaaacaagcatagcggatttaatgttgtatgccgatattgagaaaatcgtcatgaaaacgacagtcagaagcggtttgttgccgataaagcatttgaaaaccgacatgacggacagcttttctttcggcgcttcacggacgataattctttctttgcagtttcggtagcagatcataaatcccgcgattccgattacggccatcattcccatgactgccgggtagccgatgtgaacgttatcaaaatgaacgagaatcgggatgacgatgacacttgtaatgagcagcgcgccgagagagccgatctggcggaatgcggaaagcgccgttctgtcctccgcatcctgtgtaatggctgcaccgagggagccgtacggaatattgacgaaagaataagcgaccccccacagcatgtaagaagcataggcgtacacaagcttccaggtgacactcacgtccggtgacacaaaaatcaatacggtcatgaccgcaagaataatacttccgaataataagtacggcctgaatttcccccggggtccgatcttttttctgtagtcaatggccgagccgacaatcggatcagtcaaagccgcaaacagcttgctgaccaaaaaaatactgccggcgaacgctgccggaatgcctgcgacatctgtgaaaaacttcagcaaatagatctgcccgagatcaaacataaatccgttcccaaaatctccgaaaccataggatactttttctttcagactcagcttatgctccttcacttttgcggcaggtgctgtcacgacaggcacattactcataggccacctctttcattccattttttaaaagcggaaatattcctcagcattccggtaacaaattccctcgacaatcctccctaaaagctccatatcgcagggcgcttcgccttgttccgcccagccgccgatcagcgtgcagacaagccgcctgaagtattcatggcggggataggacaggaaacttcttgaatccgtcagcatcccgataaaccggctgaacaggcctgtgtttgataacgctttcatttgttgaagcattccatctttcgtgtcattgaaccaccaggctgtgccgaattgaattttccccggtgttttcccatcctgaaagctgttgatcatgctggcgataatatagttgtcattcggattcagagaatacaaaatcgttttaggcaattgccactttttttcggcggaatctaacagccgggcaagcggttttgcgatacattcatcattaatcgagtcatatcccgtatcaggaccgaggctgctgaacttatttgtattggtatttcttaacgcgttaatatggaactgcatcgcccagtccagttcggcgtaaagaccgcaaagatattgcagcgtccgtgttttgaatttcttttcatcttcaaaagacacatgctctccgcttaatccggcggcaaaaatccgggccgcttcctcttcggtcgtctcggcataaaccatttgatctaatgcgtgatccgacactcttcccccggcattgtgaaaaaagcggacgcgggattccaacgcatccaaatacgattggtaggtggtgacagccattccggaagcgctctccagcgaccggacccaatcggcaaaacccgggctgctgatgtccagacctttgtcaggccgaaatccgggcagcacttgaaccggaaaatcactttctttcaacatttcatggtatgtcagcgcatcggcaggatcatcggttgtgcaaatgactttgacatttgatttcagaatgagatcccttgcgccaaacccgtctccctgcaggagctcattcgtatttttccaaattgccgcggccgttttttcattcaatacgtcataaatgccgaaccagcgctgcagctctaaatgcgtccagctgtacagcggattgcctatcgccatcggcaccgtttttgcccaggcgaaaaacttctcttcatctgaagcgtttccggtaatgcagcgctcttcaatgccgttggccctcatgatccgccacttgtagtgatcaccgtaaagccatgcctccgtaatggttgtgaaggttttattttcatagatttcctttgggcttaagtgacagtgataatcaatgatcggcatgttttcagcgtattcccggtacagcattacggccgttttactatccagtaaaaagtcatcacccataaaagctttcacactctcatcctccctcttaaaaaatgttaacgttaacaaaatggttcttttttattttagcttcctctttctcacatatcaatcatttttattttatttttcagaaaattgtatctattaacatttttatgcaaaaaaaagacattgccgagaaaagtccggcaatgtcttctgtatgatcttaaggattagtaagcgaggctgaataatcctttgatatgtgttaaataacgtacgttacttgcttctttcattaaagatgccggaaggcctttcagcggagtagagttcgctccgatgatggcaaccgcgtctttacgtccgaggcttgcaagcgtaccagagtttacaggcttgaatgtttcaagcgtttttccttctaagtaagcgaacaggttgtaaccgacaagttcacccatctgccaagcgatttgcgctgtcggcgggtacggacggccgtccggcgcaaagtatacagcgctgtctccgacaacgaatacatcttcgtgagaagtagattgtaagaaatcgttaaccgtcgcacggccgcggttcacttcaaggccggattcgccgactaacgggttgccttgtacgccgcctgtccatacaaatgtgttggcaacgacttttgaaccgtctttcagatcaataacgtttccttcaacatttgtaacaggaagacctgttaagaactcaacgccgcgtttttcaagactttttgtcgcgcgttcgataaggtcatcaggaagaacaggaagaattttcggacctgcttctactaatttcagtttgatttctttcgggtctacgccgtattttttcgtaaggttcggcatgatgtcagcaagctcaccgacaagctcgacgcctgttaagccgccgccgccgataaggatcgttgcatcagcttcgtttttcgttttagagtattcacgcacacggtcttccacgtgtttgtatactttgttggcatcagcagcagatttcagcaccatgctgttttcttcgagtccaggaatgccgaaataagccgtaacagaaccaagtccgacaacaagcgcgtcataagtcagcttagaaccgtcagaaagggcaacttctttcttatcaactgagaaagaattgacttctgcgattttaatgtcaacgtcttttcctttcagaagtttttccagcggcatagcaacagcctgttcagacacgttgccggctgcaaggcggtgcagttccgtaatgatttggtgagtcgggtatttgttcacaacggttacgcgtgcttcatctttactgtaatgtttgcgaacggttaaagcagaaagaactccgccgtaaccagcgcctaaaatgacaatatgttttgacatcgtatatcctccgtcctttatatcaatttgaatctgagattatttttgtttttcgttcatgatttcaagatagctgttagcaaaacggaacagcttttgagcttgaggatctttcagcatgcgcagcaggccgaaaagtccgatcgtttcattgcttgcatccgcgcggtcttttgcttcgatggcagtagccgcaacttctttcgctgtttctttcaccggctcaagaatttctgtaagcgcacccactgtatcgctcttcaatacttcgtctgtcgctacagactgtgcaaaatcataagacttcgttaaaatatttactaactcagtcagttttggaagctgatccactaaaacagtcagtgattcttgaacttcaggttttagcagctgatcaataagatcgcgttggccttggctgacagatgcatttgtttgatcgattgtttctggcatatccgattctcctttactataagcagtatgctgattttttttggaaagggtagcctttcccccttcatgcagaaaagcatgaaaaagcaagattgtgaattcatgcacaatcatttacaaaaataaatgtttactacccagtttttcactttgccatatccagtattatttttatatcaacaaaaacaattgaataagtcaaaatttctttttcctctctgaaaatagcaaacataaaaaaccccaatttgatttactcttatataataacactttttgaacaaaatttgaacgtgaattgtttcgtttatgaaattatttatatggcgggggtgtaataacgtttcttttaggctatttttttacagaccgtccgcttttcccctgtcatttttcccacaattctaaaagcgggcccgattttcccgtaaaggggtcacattccgggagcgggacacggctgatttcttctgaagttctatcatttttctccgtttttgtatcgtactgccggccgcccggataagccccgatcacggtaaaatcagaactgcccgacagttttttatgtccggtgcctgccggaatgaccgctgcgtctcccgtttgaagaacggcgtccgccccttgttccccgccgaacctcaaaaccgcggttccttttaccgcgacaagaacttcgtgcgtggtgctgtgaaaatgatgatacggaaatactccgcccgtccagctgttagaccaatcgtgccggcggaggacggactctgctttctgtaccgtttcttcattaaataccgctttataaataacaagcggaagattcgggttattcggaatgcggccgtcaccttcgaaataaagcacttgaatatcctctttctgcattgtgttcacctccgtatatgtctgtttcccattcatcatttattaaaacgctattttctcatattccattgcgaagcctgccggtgaatagtatagtataaaaaaatatgtgtcaaaatgagggatttaatgaaagccatcgtgatcggaatattggcatctctgttttttgcagtcacatttattttaaacagggcgatggagctttccggcggaagctggatgtggagctcttccctgcgttttctttttatgattccgtttttatttttgatcgtttatgcgaaaggaaaatgggcgccgctctggcatgaaatccggaaaaaaccgtttttttggctgaagtggagttttaccgggttcgtgcttttttatgccccgattacgtttgcggcggcatatgggcctggctggctgatcgccggcacgtggcagattacaattgtcgcgggtgtgcttctgtcgccgtttttctgcgaaacaaaaaattcaccggcgggcccggtttccgtcagacaaaagatcccgctgatttcgctggttacttccgtcatcatcctgatcggagccgggctgattcagcttcagcatgcgggttctctgtccggccgcacgatactattcagcgtggcgccggtcgtcgtcgcggcgtttgcctatccgctcggcaaccgcaaaatgctggaacaatacggcggaaaactcgatacgtttcagcgggtgctcggcatgacgctcgcaagccttccgttttggcttttgatcgccgctttcggctggtatagagacgggcttccctcaatgggacagacattccaatcctttatcgtcgcactcagctcgggcgttatcgcaacagtattatttttccgcgccaccgatatggtgaggaatgagccgcagaagctcgctgctgttgaagcgacgcagtccggagaggttctttttgcactgatcggcgaaatcgtctttttatccgcggcgtttccgtcacttctttcatttgccggactgttcattattattgcgggaatggtcatgcatacattcgcttcccggcagacagaccagaaaacggcggagcaaacgtcagccaatctcaccggttcctgattttttacgaaaggtgtcatcctatatgaaagaagaaattccggcaatatcttttctgtcagccggcaaacgctttgaacaaaacaatacgtcctttgatgtcctaagccgtgtaaccggacatatccaaaaaggttctatcacggcgttgatagggccttccggcgcgggaaaaagcacattgctgtcactttgcaatctgatgaatacacctgatgaaggggaagtgcttgtattcggaaaagaaataaggcgctgggatatcagggagctcagaaaaaccgcgggccttgcatttcaatcagctcccgtcacggagggcacggtgcgggacaaccttctgctcgcagaaaaactccacggggcgcagcactatacccctgaagagctcgcagattttacagaccttccgcgcgggcttctggatcggaatgcgaaagaattatccggaggtcagcggcagaaactctcattagcgcgaactctcgccggactgccgtccatcctactgctggatgaaatcacctcggcgctcgactcctcatccgttctcaccattgagaaactgattacgaaactccatcggcaaaaacagctgacaatcctgtggatcacccataaccttgaacaagcagaacgattatccgatacggtatggtttatggctgagggacggcttttagagaccgcggaaacgaaaacgttctttaaggaaccgaaacacgaaaaagcccgggcgcttttacaagggagcgggtgctgatatgaatgatctttcactgttactaacaagtatatttgtcattatcgctttattcctgtctaaatcttttaaagccggtgtcgaaaaggatatgatcgtcgcaaccgtcagggccgtcattcagcttctcatcatcggctatgtgctgtcgctgatttttcgcggtgatcacccgatatttatcatattaatggtgcttctcatgctcacggccgcttcgcacaatgtcgccaaacggaaaaaaatgcggatcggctcattttggcgcgtttttctgacactggcaatcgcggaaaccgtgacgcagggacttttactgacccttcacatcattccgttcacttcaagatatgtcattccgataagcggcatggtcatcggaaactccatggtgctctcaagtctgtttttaagccggctcagttcggaagcagacctgcggaaagaagaaatccagctgattctctctctcggaggaacgcctaagcaggccgtccggcagatattgacgtccagtatgaaactcagtatgatcccgacgctagaaagccagaaaacattgggtctcgttcagcttcccggcatgatgacggggcagattttagcgggggctgatccgatacaggcggtgcgctttcagctgctgatcgtttttacaacgatggcctccgctcttcttacatgcatcatactcagcgccttgacatatccttcccttttcacggaacactggcaattaaaaaaattcagcagggaagcgtaagcttttttccctgctgaatggtggtttatgacaaggtcagagattcatagtaacgggataattcaattatcatcgctcccatccgctcaatgtccggagcaaggaccctctttaccccttcatcccggatcgcttcagccgtcactttgccgactgcggcggcaagcacatgtttttcgaatgcctgctgcaattcttttgcggatcctttttcttttgcataatcaaagagagagcgcacttgaatggctgtcgtaaaacatacggcatcgacctctccgtttaacagctctcccatcagtttatcgaccgtctccctttcaggcggaatatgctgatacggcagaacagggaatacctccgctccgtttttctcaaggaactccgttaaaaccggcgctttttcgccatgaagctgtatcataacttttttatctttaaagtcaaatcgttccaaggagcggatcagccctcttgttgtaccgtcttcatctgaggcatgcggcgtgatgccgagcttttttaaggccgcatatgttttatagcctctgcagccgattttcgcttcatgaatggccgctaaaaattcttctttcagaccgattttttccgataccgacaataacgtttccgtaccgatgcctgtggtgaatatcacccagtcggctttttgctcggcaaatgttcttacgtcgggttccatttgatcctccgccaggtatacggttccttggagggaacggatgaccgccgttccgccctgcttttctattaattttgtgatctcttctgttttccgcgaaccgccgatggcaatccgtttcccgttcaatccttttcccatcgctgttttcttcttcccttcagatgccgggcgccctatggcaggccgtcatttatttctattattgttacgcaatcagacgggaaaatcaagctatgctcccgttgaatcccccgtgcagttgctgtatcattaaccggacagaacgatttgattcgcggagggactttcaatcatggaaacaaaaaaagagttcgagacaaaaggatacgatacttcggtcatttatgagttcaatgaatatcctgatgttcacagcggccgatgtgacaattgcgactacacgctgtttaaaagctcagtgaagggcggaaaatttttgagggaatgccggagatgcggcatgaagaaaaacatataacaaaacaggcagccgtccggtgctgcctgttttcctaatcaattttcgacggacgccgttttcaaaaattcttcaatggcgcaaacagcctgttttggaccgccggtttcttttattttctgctgcatgcttttcacgcggctgagaatgtttttatcgccgtatacgttctgaacgtctttttgcagacgggccacagtgacttctttcagcggcagatgcacgccaagccccaattcatccacacgctttgcggtgacctcttgttcgtgcatttgcggaacgacaacgagcggaacacccgcattcatcgcctccattgtactgttcatcccgccgtgagatacgaacagctttgctttctccagcacatcaagctgcggaacgtgctggcggatgataaagtgatcgggcacatccgaaaaactttccggatcaattgttgtgccgactgacataataacccgccagcccgagtcccgaaacgcgtcaatacacatccggtaaaattcaggccaggcgttaaacgccgttcccagtgagatgagcataagcggacggtcatcggctgcatcaatttccagacttcccgtatttgtgcgttccccaagagacggacccgcaaaacagaatcgttcatcaaaggtttcctgtttcggctgaaaggcccttggcataaagacgatattcaatttttcaggcatgaaaaattcttccattgtcatccgtttcacttgttcattttcaattttctcctgatattcttctatcgcctgtttggccgcttccatcgtttcttcgtctcttcctaattgaaaatactcattcattgcataactcgggcagaactttacggccgggatgccgccattatccgcaaacaattttccggcaagcgctaaaaaatcaaacaggacgatgtcaggaaggtcgtctttgtacagctcttccagctgcggaagcacttcaaccgcttcttccagaaacatcacaaacgcgtcacttttgtttacccgttcttttatcgtcttcgggtccgcctttatgcttgtgcggtataaaacgggaatggcacccgttttggcaacggaagcttcaaattcctcagtcgtagcgaatgtcactttatatccgcgattgacaagttcctcggctacaggaagcgtgggattgacatgaccgtgagcggccacattaataatggcgatgtgtgtttttctcatcttttttcttctccctcattttcgtttatctcggcttctaaagactccagcccgtacatgacactgtttcggatcggctcaatccgaacgggctcaaggtgtgaaaaggcttttacaattcctttcagtgcggcttccgcttcaagtctggcaagcggagcgcctaagcagaagtgtacgccgaatccgaaggaaaggtgcggattcgattggcgatggatatcaaatacgcccgccttctcaaatttgttttcatcacggttggcagatgcaacgtagcagagaacgatctctccgcttttcaagcggcgcccgcgcagttcagtgtcgtgccggaccgtccttctgacaaacggagcgggagcgcgaaaacgcagcgtttcttccactgtttgcgcgatgagagaagggtcctgtctcagctcttcataaaggccgggcgtctctaatatgctgtaaaccgcatttgaaatgagattagtcgttgtttcatttcccgccactaaaagcaggttgcaaaacgggatcagatcttctggcgtgagcttctctccctcttcttcctcttttatcaaaatagaaataatatcttggccgggctgttttcgtttgctttctattattcccgcaaaaaacgccgccagctccgcctcacattggtcacgttcctgctgatttttctccgccgcttcaggactcgcatctttcggcatgctgacgagaatgtccgaccattttttaaactgatccatacgctcggacggaacgcctaataattctgaaatcaccatgaccggcaaagggtaagagagatctttaacgatatcaatccgccctttgttctttgcctgtttcaggagatgatcggtaatgtctttaattctcggctcccattccttcaagacacggggagtgaaagcgcgattgacggcagatctgatttgggtatgtttcggcgggtccatattcagcatggactttgcaatcgagcttttcacatcagtcatgcggcttgagaacgtctctttatcactgatgacttttttgacatcatcgtataaaaacacactccaaaccttcgtttcttcatcaaagtatatagggctttcacgtctcattttttcataccaaggaaaagggttgtatacgtccaggccgttttttcctttcatcagggttctttggatggcttgtctcgtgctcctcagcttactcatgttacatcactcctgattgtttcatatttgaatagttgacgtaccttgaattttatcctagcacatattttcaatttttttctattcataaccttaactattaacataacacaacaaaagtcatgaatccggaggtgaaatttctcccaagaaaacagcagaagcgcacaaaaaacccgagccttcagccaggctcgggagaaatgttcactcattcgtctgcggtttctggtgctgcttttggtcttcaggaggctgcgtatttctttccatatcgtccgtatcagcgcccatgcctttcaggaaagaaaacagcagagtgacggccttgttgatttccgggtcttttaaagcgcggacgatatcaaaataacccgtcttcctgccgctgtctttttcttcgacggcctttgtgacgcccgcattgattttaacgataaacggctcaagctgttttacatcgagcatgccgagaacgccgcttaacagcaggagatttttcagcatattggccgtttccggcgtattcgccttcttcaccaggatatccatcactttgtctccttggccgaagagcccgcgcagaagcgccaaaacgccgcgctcgttcatgtgctgaagaatgtgcagagattccaaaatcgcgtctttatttcgtaaaagagccgtctcgatctcttctaagtccttttttcgtttgtcttcttctgtgacggtctgttttcggatgccgctgattgctttagccattctgctgtttccccctttttacggcgtctcccggaaatacataatcttgacgcgcccatttccgatcaacccggacaccgatctgcggctgcgggtttccgtaacggaaattgattttcggaagcggattaacgccttcttttttcaaaatctccatcttcgctgatgtttctttatatgccggtgtatcggtatccttatccgcatagctgcttgtcaaaaggttaatggcggcgtcttttgaatcgttcatcgggagatagacttgtttgccttttaccctgtctgtgatgacgcatttgactttcacatttccgtacggtgatgtcagacggacaagcgttccgtcttccagccctctttcttcggcgagttcgggcgagacctcaaggaacacactcggtgttttttcggatattccttttgatcggtaagtcagattcccttcgtgaaaatgctcgagcagccgcccgttattcacatggatatcatattcttcatcaaattctttcggctcggtccactgaacgggatatagaatcgctttgccgtctgaaaacggaaacttgtccgtaaataaaagcggtgaatcggttccgtccgctgctaccggccattgcagtgaattgtagccttcgagacgttcgtaagtgacgcctacgtagagcggcgaaagcattgccgcttcttccataatgtctgccggatgttcatagcgccaatcagcgcccagccggttggcgatgtccgtaatgatctgccaatcaggctttgaatcgcccagcggttcaaacacttcgtaaaggcgctgcaccctccgttccgtattcgtaaacgtcccttctttttcaagactcgggcttgccgggagcaccacatcggcgaactcggccgtccgcgagagaaaaatatcctgcacaacgaagaaatcaagcttttcaaaggcggcatgaacatggttgatattggagtcgacaagccccatttcttccccttttacatacatacacttcagttttcccgagtggatgccctcgatcatttcatgatttgtcattccgatttctttcggcaggtctgttccccagccctgttcatactttttgcgggctttttcatccgttactttttcatagccggggaagctgtcaggcatactgccgaaatcactggctccctgcacgttattatggccccgaagcggatatgagcctgcgccgggcttgccgtaatttccggtcacaagaagcatgttggaaatggccgtgctcgtatcacttcctccgatatgctgggtgacccccatcgcccacagtgcgcatacgcttttggcttcatgaatcatccgggccactttaattaaggtatccttgtccacaccggtatgtttttccgcatattccatcgtataaggttcaaggcttttcacgaattcatctaatccgttcactctctccttcagaaatgcagtatccgccaaatcgtgatcaagcagatatttcgatacggcattcagccagacaatatctgatccggcacgcggctggaaaaacacgtcggagcgctcggccatttcatgttttcgcaagtcagcaacgacgagcttctgtccgtgcagcttatgagaacgtttaatgcgtgtggacaggacggggtgagactcagatgtatttgaaccgataatcagcacgagctcagctttttctatatctgtaatcgaccctgaatcaccgccgtatccgaccgttctgaacaatccggccgtggcgggagactggcagtagcgtgagcagttgtcgacattatttgttccgataacggctcttgcaagcttctgcatcacgtatgattcttcattcgtgcatttggaagatgtgataaacgcaagcgcgtccgggccgaaatgttcttttatatcggtaaatttatcagcgatcagctgcagcgcttcatcccattccgcctcccgaaacgagtctccttcccggataagcggtttggtaaggcgcttttcactattgacgaaatcccagccgaatttccctttcacacacgtcgaaattccatttgcgggcgcctcagcctgaggctcgacctttaaaatgtctcttcctttcgtccatatatcaaaactgcagccgacaccgcagtatgtgcatacggttttcgtttttttgattctttcatcccgcatggccgattccatatccgatatggctaaaattgatccgtatccggtttcgacgccttttgtgatatcaatcatcggccgaagcgtctcttggttaatgcctgttaaatacccagcttcgccttccatgcctttttccatcatggcattgcacggacataccgtcgaacaatgtccgcaggaaacacatgatgattcattgatcggcacatcctgatcccaaatgacccgcgggcgtttccgctcccaatcaatgcttaaggtttcggttacctgtacgtcctgacaggcttcgacgcagcgtccgcacaaaatgcactgatcgggatcatatcggtaaaacggatttgattcatctttaggatacggtttttgatcgaacggaatgctttgatgattgattttcatttcctttacggtattatgtatttcgcagctcccattgttgtaatcacagaccgtacagtacaattcatggttgtgcaaaatgttgtccatgccgataacctgcgctttttttacatcggacgaaagcgtatcaatgacatctccgtcctttatttgcgcggaacacgaacgcaccagttccccgttaacattgacgatacaggtatcgcacgtttcaatcggcccgagactcgggtgataacacacgtgcggcacgtcaattgaactattgttcaaaagctgcaaaacggtttggccgtccggcgcttccatttcaaccccattgattgtaactttctttgtatcagccattttctttcccctttctgtacccctctatacatcctctatgattcccaaccggcctttcactaaaacatctcgtttatctcaggaaacatacgggtatgagcggtaaaaaggaggcgttcacatgttgaagaaaaaaacactcgtcacgggattatcggcagtgatgctcacgggatgcgctttcggagcagaagcattttcggatacacagcccgtccatgccgcagccgcttcaaaaacggaaaaccagcgtgcacaagaactggtgaacagcctttaccaatcggcatttaaaggggaaatgccgcaaaatgtgaaaggcctgaaaatcaaccaaagcacaagacaggacgtttacaataaaatcggcgagccggaacaaaaagcagacagccgcaatccatttgatttatacagctggaacatgggaaaccccgggtatggattttcctatcataaaaacggaaaaatctcggaaatacgctattttggaacgggggtcgagcggcgcttaaacctcggcagcgtcacacctgacgtcttaagcaaacaaatcggcagcgctgacaaaatcctgacagtgccagaaacgggcgaaacagattacgtctaccatacggggcagtatgagctccgcttcgtcatcggcagtgatcaaaaagcagatcatgtcaacctaaaagccagataacgcaaaaaagcggcctcccgggccgtttttttcatagacagcttctccgtcgttccttacaatacatgggagtacaaaaaaaggggaacagtgtgaagtgaatagacatccattgacatacggaatatgtaccgtttttatcatcgccctcggtttgctgtccagaaccgcatacatcaccgccctattgcccggcatcataaacgcttatttaggagatgccttgtgggcggccatgatttttacaggattcgggcttttcttacggcacatccggacggaaacagccgcaattttgagcctctcgttttgctgtctgattgaatgcagccagctgtatcacgcgccatggattgacgcgatcagaagcagcacgctcggcgggctgatcctcggctggcaatttgtctggagtgacattttcgcctataccctcggggtatgcgctgccgcacttttagaatgggccgtaaaaagaaaccgccagccctcttcataatcggagcacgccgccgatatgaagggataaggaggtggaagctatggatatccctgcgttatcaatcgcaatgcatcagtcatctctggcgcagaatgtaaatatcgctttaacaaaaacggtcatgcagcatgcacaggctgcggcggaagaaacagtgaaaatgctgccgtcccagcacccgactgccggccattcaattgatgtgaaagtgtaaaaaaagatgccggatgataaccggcgtcttttttttgcccattgtacatacaccgtaccgggcatacaggaataaggtaaacggaaccaacatttgaaaaggaggttttcctcttgtacgatcctttcgatcatgaatacacagccgagagccacgaacgggtgccatatcattatccgcggccgccttattattaccccagaccatatccatactatccgcggccgccttattattaccccagaccatacccatactatccgcggccgtatatcccgttctatccttggtattaatgtttgaaaagaaatgactgcagacaggaggcttcccctgtctgctattcaactttgaccgacaggatatacgggagggcttgaactttctccattaccgctgctttcccgcttttgcttttcacccttcccttcacttcaagcaccgccttattcaattcataggacgtaatcagaattcctttttcctcaagagaagttaaaatatcatgcatgacggctttctcttcaatcctgaaactgacagacaaagaatgcgccgccggtttaaacagaaaatttaacagttcaagcccgattaacgccaaaatcgtgccgctgatgccgatgacatacatacctgccccgatcgtcagcccgatccccgacgtagcccaaatccccgcggccgtcgtaagcccccgcacgacatgccgctgcaaaataatcgtgccggctcctaaaaatccgacgccgctgacgacctgcgccgccacccggctcggatcaaaggacgtatggctgttggataacaaatcaaaaaagccgtatttggaaacgatcatcatcaaggcgctgccgacggccactaaaaaatgcgtcctcaaaccggcttcctttgccctgaattctctctccaatccaataagagccccaagcagacccgcaaccgccagacgaatcacaaaatcaagttccatccgtctctctcctttccttatcttcttacccgcttttataacccaatcatgcggtgtatctttttttaaaatgcaccgactaattgacataaggaggttttatgaaatatattctgtggttttttatattattgttatttagcttatttattttgggaggatataaagcagctgtttctcaccctgatttcccggtgccattattcgctatgcacactaaaacaaaggaatatgaaaaaggaaaatacgtttcaaactatacataccgtttcgcaaaagaagaagaaggtccgagcggtttataccaattggaaatagccgaaaaaggctggaaacttaaagggcaggaaggacttatcaaaacctatgaaaagcgaggagaacgtgtttcactttttttcggtacgggggaaataagcgtcattgaagaatgatccttctcaaaagacaggctgaaatccgcaaacggcatatcttttacgactcccttatctctgcgaatctataaattcagccaatatttcaattaaggcgaacacctttctgatgcaaaaaatgccgccttcaatgagaaaatcattatacaaaaacaaaagcgcaactgaaaaagaataagcacctcataaaaaaagccctctttttaaaaaagagggctgcagaaggaaaacaggtaattatttatctaaagtgtactcactcacattaaaagtaagaatgtttccaaaaacaatatggtcccttctattttgaaaaggccctatattattatagtgcttctcgataacatatctagataagcctattccagaacttttttgatcataccatctgataaaatctttaatctcttccattgaaagatcaaattctttctcaagacctgtggtcattgtaacaagaagaattgcccgattactggcgggctgtttatttggtggttcctcaggattctttggttctccatctttatcctcttcggtttttaccggagtaagagcatgcagatattctaatgcatatccagacggcgttagaccgccaaaaagataaagattgtctccaactgcggctattctggcatcatatctttcaaaaggatagggtttttctacgctaatttcatctttaattggatcatatacttttgttaaaggctcaatcacacttggattttttctaccgccaataatgtaaatcttattattaaggacagctgtcgaagtattttgcaaaggtcctaaaaattttttgcgattccatctatccataacaggatcatattcgtaaatatattcgtttagatcgcttctgatatgtccttgaactacttctttagtttgcccgccaactaaataaatctttccgttaaaaacttcagtttctgttgcatatatattaattgggggcgcttttttaacactccaagttttggataaagtatcaaaagcataatgttgcgaatgagcagcatcggtgtcgaatcccccaatcaaataaattgtatcgttaataacagcggctgatgcatggcaagtcggggtcggaatatcaggtacacgtccccatgtatttgttttagtatcataaacatctacagagctgtaaacatttgctcccttataaccgcccaatacataaatataattacctatcactgctgtgcatgaacctaccctgggtgtgggtatatctaatccttgcgtccatttttgacttatggtgtcaaaactataatttttgttatatttttgattacgtgcacctcccaatacataaatagagttacccacaactgctgattcaaaagcataattaggttcaatcatatcaagtaatcttgtccacttgtcatatttctctgtcaatttattcattcctctcatctttgtgataattccatttatagatggcgatcgtatgacaagagattcatttaactaagcgatccaagatcacttactttcgatcaaagaaatattgaaaaaggcctctggatttaaaagtgatttggttttcacttctcggttattggccaacagtttactaaaaatttagtatataagtgtaatatagaataacacctctcaatgaatccttaatgaagctcataatagcttcaaccaaaggcatttcacattaaagtaaagatcactctcaatccaactgcatctctcaaacagaatgtccggcaatcacctcaaaaaacgaggtgaaatctgtcagtatcccgtcacccgccagctgtttttcttcaaatagcgcgcggttttttccgtgcgggtcaatggccataatcttgcccgcacctgcttttttcgccgctgtgagccccgaaaaggcatcttcaatgaccaagcattcttcaggtctgaggcctaacttttccgatgcgatgagaaaaatatccggcgccggttttccggggaagctcccgtcatcaaacgtgactttgtcaaaatcaaaccactgatccaaatgaaagacgtcaaagtaaaactcgacattttcctttaccgtagccgtagcgatggtcatcggcgtttcagattttttcagatgattcaatacgccggtcagtcccttcgtcagctttaattcgtctttgttttcaaggcataattctctgtagtaagcttctttttcaaaagacagcttcctgatttcttcatttgttaaatcgccggaaataaaatacgtcaggatttcactgtttgttctcccgtgaatgttaacgaaaatgtcttcatcagaaatggttttcggcgcgtattttttcaccatgaaaaaccatgctttttcgtgcagatgcgaatcttgaaacatcgtgccgttgaaatcaaaaataacccctttcatcgaaccgcccgccttttttatttttttgcgattttgacatctacatattgctcgtaatgaatttgaacatctttcatgactttatcatccgtaatcagatagtccatatcgtgcaagttatagaacacgtaaaaatcttcccggttaaattttttattatccgccagcaaaaatttcgtccgcgaattattcagcgcgatttggtgagcttccccttcttcaatgctgtaagaagaaatctcatcattatgtatgccgttggcgctgatgaaagccttcgtaaaattgaatttctgcagattgccgttcacgatggggccgacgaaggcaccggtattttttcggaagtcgccgccaatcaggatggtatccgcagtgtcgccatgtttcaaaatatcaaatacgggatagttgtttgtgataatcctgattcgcttatgcagcaggtgtttcgctaaaagttcaatcgtcgtgccgggccctaaaaaaacggtatcgccgtcatttacataggaagctgcgagttccgcgatcttccccttctcctccatttgaacaccgagtttttcattatgcgataattcgtgatcaatggaataagatatgctctgtgcgcctccgtgaatacgtacgatttttccggccttatccagctcgtccagatctcttctcactgtcatatcagaaacttccagttcatcgataatatcactcaccgtaataaacccccgcgagtttacgatatcgatgatttttaaaagtcgctctttttttaacatgttcaatcatcccctcaactttacacacaatctaacatactgcggcaatccggtcaacaaaaataaacattaacaaacaacataatcaacatgtaaaacaacgaaaaacttatataacctctataaacacagatgttatttctttatgaagctattgacaacaaaaatatatgcgtttactattaaacaaaagacaacaattacaaacattaacaaactccaattcacacattggcgaaggaggattcagtaatgctcaaattacctcatgactttattttcggcggggcgactgcggcatatcaagcggaaggcgccacaaaagaaggcggcaaaggccctgtggcctgggatgaatttcttgaaaaacagggaagattcagccctgatccggcaagtgatttttaccgccagtttccggaagatattaaactatgtgaaaaattcggaataaacggcatccgcctttctatagcctggacgagaattttccctgacggcacgggcaaaatcaatcaggaaggtgttgattactatcatcgtattttctcagagtgccataaacgcaacgtcaccccttttgtcacgctgcatcatttcgatacaccgaaaggattatttgatcagggagatttcctcaaccgcgctgcaatagaagcgttcgtcagctatgcggagttttgctttaaagaattcagcgaaatcagatattggagcacgtttaacgaaatttatcccacagccaccaaccagtatttactcggggttttcccgccatctgttaaaagtgatatcacaaaagtcattcaatgcctccatcacatgatggtagcgcatgcgatgaccgtcaacctttttaaagacggcggttatccgggagaaatcggggtcgtccactcattggaaacaaaatatcccgccagcggcacagaagaagaccgccacgcctgttttctggatgacgcgttatcagtgagattcctcctcgatgccacctaccttggctattattctgaggaaaccatgcgtgctctggatgaaatctgtgaggcaaacggcgcttcatacgagttttcagacagtgactttgacgtgatgaaaaaagcctcaacgcgcaatgattatctcggcatcaatcattatcaatgccatttcgtcaaagcgtacgacggagaaaccgttattcaccataacggaacgggcgataagggcacttcggtctataaagtaaaaggaatcggcgaacgaatttacaaagaaggcctgaagcggaccgattgggactggctcatttaccctgaaggcatgtatgacatgctgatgcgcatcaaacgggactatccgcaatataacaaaatttacattaccgaaaacggcatgggctataaagatgagtttgaagacggcatcattatggataaggcaagaatcgactatttaaaagtatatttagaagccgtcagtaaagcgattaccgacggagtcaatgtaaaggggtacttcttatggtccttaatggatttattttcatggaccaacggctacaacaaacgttacggtcttttttacgtcgacttcgacacccaaaaacggtatccgaaagaatcggcctactggtacaaacttgtaagtgaaacaaaaacaatcatttaacgatcatacatgatgaaaagaatctctttccatcatgtgtgccgtctttaggaggtttttttcatgacaaaggaagaattgcagatgctcggttttgaaatcgtcgcctatgccggcgacgccaggagcactttattgaaagtcctgaaagaagtccgtgccggaaacttcgaaaacacggaagcagcattgaaaagcgccgatgaaaatttaaccctcgcccacaatgcgcaaacgaaaatgttagctgaagaagctgacggcaaggacatggaattagggtttattttcgttcacggccaggaccacttgatgacaacccttttgctccgtgatcttattcaggattttatagaactctaccgaagccgccgataaggagtggaaaaatgaacggtatcatcaagcaaatcgaaaagggaaaaccgtttttcgaaaaaatctcaagaaacatttatttaggcgcgatccgcgacggcttcttaactgccatgcctgttattttattcgccagcattttcatcctcaccgccgctgtgccggaagtgttgggtttcacttggcctaaaagtgtttctgaatggctttggaaagtttataactattcaatgggcgccctcggtctgatcgttgcggcaacaagtgcgaaatgcctgagtgaatcaatgaaccgaaaaatgccgaaaaacaaagggatcaaccccgtttcagcgatgcttgcttcagtcgtcgggtttctcattttaagcgtcactcaaatcgacggcgggttctccgcggaatatctcggcacaaaaggtcttttagccgcttttgtatccgctttcataacggtgaacgtttacagattctgcgtgctgaaaaatattacgattaaaatgcctaaagaagtaccgggtaccatttcacaaacatttaaagatgtttttccgttcgctttttccgttttggccatggtgatcgttgatttattgatcaggaatacgctgaatgtatcgtttgcggaggctctctcctctctcttatcgccattttttaccgccgcagacggttatctcgggatttgtgtcatttggggaatgatggcgctgttctggtttgtcggcgttcacgggccttctattgtagagccggccatcgcagctattatttacgcaaatgtggaggcgaaccttcagcttcataatgccggcgagcaggcgtccaacgtgctgaccgtcggactcgggaacttcgtcggcacaatgggaggaaccggcgcaacccttgttgttccgtttatctttctgcttttcgcgaaatccaagcaattgaaagcagtcggaaaagcatccgcggttccggtgtctttcgcagtaaacgaacctcttctctttgctgcgccgatcattttaaatccttattttttcattccgtttgttgtaacgccgatggtgaatgtctgtctgtttaaatttttcgtggatgtcatcggaatgaacagttttatgtatgttcttccgtgggccaccccggcgcccgccggcttgattctcggaaccggcatggggctctcggcttttgttctgacggctgtattaattattgtcgatttcctgatatacctgccattctgtaaagcttatgacaaagtattagcggcggaagaagcccaacataccgaacctgaaaccgcgccgcaaaaatcccgggagatacagcccgtaatggccggcgcctcagaagacgcggccaccgtcatcagcacaaatcttcaggaatcctcatccgccttggaacacggcaccaatgtgttagtgctgtgcgccggagcgggaacgagcgctatgcttgcgaacgcactgaccgaaggagccgaagaatacaacgtgccgatcaccgcctcagcaggcgcctacggatcccattacgacatcatgaaagacttcgatatgatcattttggctccgcaagtcggctcttattatgatgacattaaagaagatgcggaccgcctgcatgtgaaactcgtcgcaacgaaaggagcggaatatatcagcctcaccagaaattcacaaaaagccattcagttcatactggagcatacctcaaaatagaatcggaggtttaccatggatgccaaacttttgaaatcaagattcgaagacattttcaagagaagtaacggagaactgtttttcgcacccggccggatcaacctgatcggggaacatacggattatataggcggtcacgttcttccatgcgcgatcacgatcggaacatatgccgtatgcgcaaaacgcgaagatcaccagatccggttatactcagaaaactttcctgacagcggcattgtctgccttgatctttccgccactgcatacaaaaaagaagacggctgggccaattatccgaaggggatggtccattaccttcttgaagccggcggccaaatagacagcggaatggatattctttttcacggtacgattccaaacggagccggtttaagctcctctgcttccattgaaatgttaaccggttccattttaagaaagttattcagcctggatgtttccgatactgaactggcgcttatcggaaaaagagtcgaaaatgaatttatcggcgtgaattcagggattatggatcaattcgcagtgcaaaaaggcaaaaagaacatggccattctgttaaactgcgataagcttgagcacgaaatgattccggctgcttttaacggatataaaatcgtcattatgaatacgaacaagcgccgggagctggcggcttcaaagtataatgaacgccgcagcgaatgcgacgcggctctcacggaactgcggcaatatcaaaatatcgcatcacttgcggaattgacgggagaagaattcaacgaactcgaacctcttctctcccgtgaaactttgcgtaaaagagcccggcacgcggtcaatgaaaacgagcggaccctctcagcggcggaagctctcaaatcgaatgatttgaaaacgttcggggagctgatgaatgcgtcgcaccgttcgttacgtgatgactacgaagtgaccggtgacgaattagacgcgctggctgaagcagcctggaaagaaggagcactcggagcgcggatgacgggcgcggggttcggcggctgcgccatagccattgtggaaagtgaagaaaccgccggctttatccgggccgtttcatctcactaccgcagcaggacaggtcttgaagcttctttctacatcgcggatataagcgatggcgcggctgaatggagggaaaaataaatcatggcgattctcgttctcggcggagccggctatatcggttctcatgcggttgatcaattagtaaacaaaggatttgaaacgatagctgtggataatctccagacaggccaccggaaagccgttcatgaaaaagccgttttttaccatggagatatccgtgacaaaccgtttcttcgctctgtatttgcgaaggagaacgtaacaggcgttctccattttgccgctcaatcccttgtcggcgaatcaatgaaagaccctctttcatatttcaataataatgtgtacggtacgcaaattacgctggaggtcatgcaggaattcgaagtgaaacacattgtgttttcttcatccgccgctgtttacggcgaacctgaaaaagcgcccatcacagaagacatgccggaaaagccggaaagcgcatacggcgaatcaaaactcatggcagaaaaaatgctgaagtggtgcgataccgcttgcggcataaaatatgtctcgcttcggtattttaacgttgccggcgcgaaaacggacggttccatcggagaagatcatcatccggaaacccaccttatccctatccttttacaaaccgcgctcggtcagcgcgaggaggttttgatattcggcactgactatgatacaaaagacggcacgtgcatccgcgattatgttcatgtttctgatttaatcgatgcccatattctcgctctggaatatttgcaaaacggcggagacagcggcattttcaatttaggatcaagcagcgggttttccgtatcagaaatggcggaagcggcccggcaagtgaccgaaagagacataaaagtaagagcgtccgcaagaagacccggtgatccaagcgccctcatcgcttccagcgataaagcgcggaacattctcggctggaatccgaaacaaacggacatatcggaaatcattgcgtcagcatggaattggcatcggcatcatcctaacggatacaaggacaaatgaaatggaggcggcggtcattgacgtttttgaatcagtggcagggtttctgaaagaaagcactgtcttaggcgacataaatgaaacagatgtgatttatacaagaaacagacttctcgatctgctcggactgacggattatgcagaaccgaaacgtatcaagaaacaaaacaggcttcactatttggacgaaatggtgaaagacgcggtaaaacggtcaatcataaacgatacgccggctgaaagagacatgctgggaagcagaatcatggacgtaatcacaccggccccttctctgatcaatgacgcattcagcgaattgttatcagattgcccgaaaaaagcaacagattatttttatagattgagtcaaaacaacgactatattaagacgcgggccattcgaaaaaatatcgtgtaccgctcaataacaccttttggggaattggacatcaccattaatctatcaaaaccggaaaaagaccctaaagacatcgccgcggtaaaaaacagtccggaaaaccggtatccgaaatgtctgctctgtatggaaaacgaggggtatgccggaacaccgcatcaccccgcccgttcaaaccaccgcatcatcaggcttgacttagcgggagaacagtggggttttcaatactctccttatgcgtattacagcgagcatgccatctttctttcaagcgtgcacaagccgatgaacatcagccgcgaaagcttcagaaggcttctggccattacggaaattttccctcattatttcgcgggatcaaacgcagacttgccgatcgtaggaggttccattctttcacacgatcattatcaaggcggcgcccatgagtttcccatggcaaaagcgggttccctctacccttttcatatgcgtcattttccagacgttcaggccgaagccgtgaagtggccggtatcagtgatccgccttcgcgcaaaagatccggatttgctgacagatgccgctgcgtatgtttttgaaaagtggcgggaatattcagacgaaaccgtcagcatcatcgcgaagacaaatgaaccccataataccgtcaccccgattgccagacgcaggggaacggattttgaaatcgatctcgctctcagaaacaaccgcacctccgaagattatccggatggcatttttcacccgcatcaagacgttcatcacatcaaaaaagaaaatatcggtctgattgaagtgatggggctcgccgttttacctccccgtctgaaagatgagctggcagaagtgaaaaagtatttactgaatgaacatcatgacatcaaggacattcatcttccgtgggctgaaaacatcaaagcggataaagacgtgacaccggaaaatgcagccgctgttttacaaagagaaaccgcgaatgtatttttacgcgcgctgaccgatgcaggcgtttttaaaatgacacccgaaggaattcaggcgtttcagcgtttcacgacgttattggagaatgacagctgaaacattcagagtgaaatcaatcaacaatcttttttatcaggaggtattgtgatgttcaaaaaccgattgaaacgtgtatttgtaaacgcaatctgtctttctctcattttcaccgcttttacatttcttgagaagtctcctaaagcaaaagcggatgccccgtttgcctatggcgctgatataggatggctgaaacaaatggaggatgaaggtgtgcgctggctggatgacggcgggaaacagaaagatgccttgcagattcttaaagatcacggaataaatgccgtgagactgagagtgtttgtgaatccgccaagcagctattattggctgaaagacggcacaacatggacgatgctcggctatagtgacaaagcgggcgtacttgcggcggccaaaagggcaaaagcgttaggaatgaaagtaatggttgacttccattacagtgatgtgttcgctgatcccggccaccagatcaagccgaaccaatggaccggctattcaaacagccagctgcaggcagccgtgtataaccatacgtacgatgtcatgaaagaacttaaaaatcacggcatctctcctgattgggtgcaagtaggaaatgaaatgaattcaggaattttactgcccgacggcagcacgagcgatttcagcaaattgaccggcttactgaacaaaggctatgacgccgtgaaatccgtcagcccggccaccaaggtaatcagccatttagcacacggcacggacaacagcctattcagatggtggtttgatcaattctttaaaaacggagggaaaaccgacatcatcggcgtttcgttctatccctattgggaaggtaagccgtactgggagctcaccggccatttatcatctaatttgaatgacatcgcctcacgctacaacaaggaagtcatggtggttgaactgggcggagatgaaaataatccgaaagattcctactggaccataaaagacaccataaaactggtgaaagccgttccgaacggcaaaggaaccggcgtattttactgggaacccgaagctcactccagcgttctgtcagatgcgtatccattaggcgcaaccgcaaaagtgtctaaaaacgtcttgaaatacacaaccgcaattgacgctttttatgatgccgcaacaggaaaatgattgatgcaattctaaagcaggctcttttcgcagcctgcttttttgtaaggctgcagagttagcctgttatgaagagctaataacgaatacggaaagaaacatactcgaaaaaccacatttcggttaaaaataggatacttcttctgttccccctccttcttatttctgcgcactatctctcagttcctaaataataactttacgattgttgaaaaagaaacaaacattttataatattgtgtaagcaccaccgagcaggaggacgggtcatggacaaaaaagaacagctcctcacggatttcagggacttttttaacaagatggtgtggctgaataggctgaagatggaagaaagccttaaggggcataaaccttctgaagtgcattgcatcgaattcatcgaaaaaattgaagacgccaatgtgacaaaacttgcggagtccctttatatgacaagaggcgctataagtaaattaacgaagaagcttatcaataaaggccttatcgaaagctatcagaagccgcttaataagaaagaaatctatttcaggcttaccgagcaaggaaaagtcatttataaaattcacgaggaattgcacaaagagtttcaagaacgggacaaaatcgtgtttgaacaagtaactgatgaacaatttgacacgatgctgagcttcgtggaaacatacagcaggcatttggattcagaaataaagaaacttggtgcagacatgaaatcggaataaaaccataggcagccctgctccatgaaaacgggctgcctttttatatccctcttattgttgacaaagaaacaaaatcactctattattttgttgacaaggaaacaaatacggcgattttgagaggagaataatatgtcaacacataaaagaaaggaacttcggctgccaaaagaagttctcacagccgcctgggctattgcactgggagcaattgctccaatgcttgactctacgatggtaaacatcgccatcgacaaactgaccaaagacttcaacacgacattggataccattcagtggtccgttacaggctatatgttagcacttgcgattgcagtacccgtatccggctggcttatgaataaatataacggtaagaaaatcttcatcggctcagtcatcgcctttggtgtcatttctgtttttgcgggaatgagccgtgacgtttccagcttcatcttcttccgtttgcttcaaggattcagcgccggcattatcactccgcttatgtcaacactcttggttaaaacggcaggtccggaaaacctgggaaaagtgatggcaatcgtcagcacccctatgatcttcggcccgatcttaggacctgtcatcggaggcttcatcgtccaagtcgcttcatggcattggattttttacatcaacgtgttcatcgttttggttgccgcaccgcttatgatgaaaaccattccagactttgaaccattcaacaaagatcgtaaactcgatattttcgggattatcaatttgtcattaatgagcgcggcattgatgtacggtattacgaaagcggcggatcatgcatcatttaacaatagcgacaccattttatgggcgggcatcggtcttgtttcagcagtcatttatcttgtatataatctgatcaagaaaaaccaaaccgtgctgcctatgaatttgtttgcaaacaagagcttcttagcatcttcgatcgggttgttcttagcgaatgttgccatcatggggccgatgttaatacttccgctgttttttcaagacattcgtcatttcacggcagtcggagcagcactcgctttaatccctcaaggagtcggaatgctcgtgactcgtccgctgatcggaaaaatgattgataagatcggtgcgaaatacgtggttacggtcagtcttgttctttcgctgatcggatctatcccgcttatttttatcaccgataacacaagtatgatttggatttccgtcgtattatttatccgcggcaccagttttggaggaattatgctcccattaatgagtgacgcttatacaggtcttgacagcaaacagcttccggaagcaggtgtcggtattcatatgattgaaaacctcggttccagctttgggtcagctgtgatcgcaaccgttaccgcaactgtcatacaaggattgcagccaacgattccgaacagtttaaaaggctaccatgccggattcttagtatccgtcatcatccttgcggccatcttcattccaagtctgttccttacccataaaaagactgcgatataaagaacttttcaaagtaaaaaacccttgcgcagcaagggttttaatgaatgaaactgatgattgttgccggcagagtcagccaacaacatacaaagccttttactcattcacattgcttttcattaaccattctacttccgttaattcttgtttttgaacgtcttttgtgtgctttttcgtaaaatggactttaacagcttcttcgttttcccaaatctcccaaagcataattttgcgttctgatggttcaagcggatgagcatggaactgaatacagccttcttctttgttcgtttcttcctcaagttttttgaattccttcattatttcattaaggtctttatcactgatgatttttaagcatgccgttatgtaatgcatcgaaactccccctcttcccatcattttatggctttacattataacatcgaaacccgcataccgcattctcaacatataaaaaaccgtccataaaaaatgaacggcaatgtttatttaagatcatgaagagcgacttttgcagcctcagcgataagagcattatgataatcggcatcttctgtaaatcggtttgacaggattgccaaaacaatcggagctctgtcaggcggccaaacgatggcaatgtcgtttcgcgtcccgtaacttccggctccggatttatcgccgacttcccatcctgcaggagcgcctgcccgaatcagttcatcgccggtagcgttgccccgcatccaatccgttaagatcgtgcgcttgtcagtcgtgagagtgttacccaaagtgaacgctttaagatcggttgccagtgcctttgctgtgcttgtgtcacgacgatccccgggaatcgcagagtttagatccgtctcgaatcgatccgctttcgttacatgatccccaatctgtttcagtgatttttcgaaacctttagggccgccaagctgctgcagcaataggttccccgcagtattatcgctgtaacggacagcggcttctgagatttctttcaggctcatgcctgtatccaggtgtttttctgtgattggagaatatgtaactaaatcgtctttgctgtagcggatgatggcattaagtttttcatttgagcttttcttcagaacagcagctgcagccagaactttataggttgatgcgtaagcaaaccgttcattcggccgataggcgattgtcttgtttgaccccgtatcaatcgcataaaccccaagcctggcatcaaattttttctcaagctgaacaaatttttgattcgttatacagcttgtcatttttgtgttttctatggattttgcttcagcgtgcgtagagccgaataaagggctgaaaccggtaaagcttaaacataaaagcccaatgcatattccaacttgtattcccgctttatttttcacatccagacctcctcattataatgtttttgtatacatcttctaattaacattacaaacaggatgaaagtcaatatatttcctgtgaatgattaaatcctgcattctgattcctccccttattaaatgcgccgcccttgccgcgtctgaatgtttgcatgtccgcttcgtgttcattatctatttgttatccctccgtgcaaataaaaacggacaccaatcagagcatagtgagctgtgcaatgatcagtgtccgcaggctttccgtcttggatctatatatgtttctcttgcagactataaaaatcataaggtaagttaacaaacgcattaccttaatctcgcggtcaaaattatatcattttatatatttcaataagattattatctggatctctgaaatgagcaactcgtgcacgccattcctgacgatcatgtggttcattgacgcatgtaatcccttgcttgtgcaaatagtcatacgttttatcaacatcttctaccttaaattgaagcaaaaatctcgattgcgaatctccgtctaaagattttctttcttctccaactatttcagccatattttcttgagataaaagctctattttcgtttctccattatcgaaaagtgcatattccatttccttctctaaccaacttattggaagtcctaatgaatctttataaaactcgacgctttttttaaagtcattaaccaatagtctaatttgcagcagtttcatattgaacgcctcctatcattttactggccattcatttaatcatacaatagggacctgacagcattatgtcaagtttccacaaaaaaatttcccatactgcacccaaatttcggatggaaagccttcgaagattcatgaaactgcgtttgatcaattcacattcttagtttgaattctcctcctctccaccgtggaggctccggccgtgtaagtcgcgcacccgtaaacatccggcccccgctcccataagtaacacaactgataaataattgactgagtcgttttttcaccgtcatcgcttcccctgttttttatattctgcgatttccttaggggtagccttccggactccgtctgtgtctgtcctgtttgccacttgagcgccttccatgttttttatctcgctgacgactcccaaatgctctaaatacacatgatcaccaatcttgaaacgattcagtttggcccgctcctcggtcatgctcctgtattcagtcgcggctttcatttttaattcagccagacacatttgacaaagtgttactgttacagaattgccgttaaaatcagtaaacgaaaccgatctgacagattccttttccgggtgcatcgtacatgttttcttcataggtgaaggccgtgtaaatttaatcattccgcttcctcctcaaaaaagtcttttcgtccctctgacataactcggatgaatgggaagttccgtacccccgcattcgaactgtcacaacacatggagattgcctttccttcgccgtctgacggattttcatccatcctgcatagctgtaagcctatattcctttatattcccaatgcccgccgcacttccctgttatgatgaagtttttaaagctattgaccagttgcccaggttgattccatgcggaaagcagtttgggccgccgtatcctaattcattcgggtaaatttcagccctctaatatgtgtgtgtatgctttttaaaggaagtgcgtcacatgatgttctaacaaccgattcaacctaaagctaactctaccccaattcccgatcataaaataagtaaatttacccagaacaaattaatcattttgcactttcaaaatacttatttggcttttccttcattcttccatggtaatatcttgttgaagtatttcgcatgaaaggatatggtcatgaaagttttcgaagcaaccaccctcctcgccgccgccaaacagcgtgcgggtgaatataaaaaactgcgcggtcagatggtcaacctaaaaaaagcgtttcaaggtatggctgatcttggtgacaatgatttctcaggccggggcgctgacaatatcaaagcctttttccaggatcacgccggcgtcacagacagctggcttgatctgatcgatatgaaaatcgcatttctcacaagccttcccggcaaagtcgaagacgcaggtctttccgaatctcatgtagaagaatcttttctggagcacgagctcacccatgccctcagtaaatcaaaggcgattatggaagcgcagaaaaaagacatgcgctccatcctcggtgagatcgaagacatcatctcgctcgaattgttttcaaccgaaagcacagatcaaaagctttcttcagctgacaaaaaaagaagcgaaaccatacataaactcggcaagcttgatcacgatctaacgaaagaatacgcagaaaccgaagcgaacgaacagtttatccaagccgactttcagcagctccaaaacgccacaggcaaaggaaaaagcgccacgccgcttcactacaacgccaaagcgtaccgtgaaagcgacatccataagaaaaaaggcgatatcgcaagacattcggatgcttatttgacgattaaaaaggaagaagcgaaagagcgtgaaatcaaggatctgaagaaaaagctggctgatggtgtcaccgatccggatgagtatttggaaatcgcaaagaagatcggctatgaaaaccttgaacccgctcaggtggaatatgtaatgcagcttgaacaagcaaaacagcttgaagaagtcggagaaacggcttgggatatcgtcaaaggaataggcgtcggcctttatgatgtgggaaaagacaccataaccggcgtcaaagatctggctgtcggcgcatgggatttttaccatctctccgatgaacaaaaagtcgctaaaaccatatcggctgtattgaacacgccctcctacgcaaaaatcatatggacaaacctggcggattcgtggaatgataaaatggttaacggggatgcgtattcaagatcccattacatcacttacgccatcgggagcatcgtcgggctcaaaggttccggctcagctgtaaaagtatcaagcaagctcgcgaaaacaggcgccgccaaagtggataacgtcttggaagccggtgaaaaagcagctgcaaaacatgtaaaaaccgggattgaaaaaggaaaaaattatatcaattccgtttcgaaaaataagtaccaacccgcgcttgccggaatagcacaggatattgaaaatactcacaatgtgaagaatactcctttgttgaaaagtattattgaagatcagaaagagagtgtgctcagtaaatctgtgacttctgacaataacggcatacatagtgttaaacaaggagacagcagtcctctcgcaccaggcggtggcttagctgctcacgaagcaaaaggcggacaccttctagaaaggcatgttgggaagactgatgaagagttattacagaggctacagataaacaagaagatacgtgcctcttctagtttcactgataggccaactgcagaaagagtcgctaatgaaacattaactaaacataaaaaggaaattgaagagtggttaaaaagtgatgttaacgatccattaccgttaccttatagaggaaccgaagttataggtagaggagttcgtaaaggttcaaatgaagttaaagatatgactaatgctagaatagtattaaagaaaaataaagatggtagctttatactaacaggctacccaacgaggtgatatataatgattgaaattaaagtttctgatcctgtatttagatttctcggcggacattttcaccaagatatagagtctccggaaaatgcacttgatgaatatttaaatgaagcatcacaaaaactaaaagaaagagatttaatagcactaactgagtttgtaaatagtgattattcagaagaagacaagaatgaatttatagaggaagcagcggatggtatatactttcctgaagatgatataactccattagaatggcttaagcaagtcactgaacaaattaaaaagcatcttaaacaacatagttagaaaaagagccctcttttaagaagggcttcttttattaattcaatttcgctttcgtttttggtccgcaaattccgtctggcttcaaaccatacatgagctgaatcgtactgaatcgttcagccgcatttactgatgtaagtgaatttaaataaattgcaaaaaaaccctcctcatcttgagaagggctctgacttatacttctttttctctaaatcagtccgaagcaaaaaactgatgccgctcaacttttcaatcgaagtgcttcagcgggttctccaactatttgcccctatgcttttcttttgctttttgttttctgattaaatattcttgttcctttattttttctctttgttttttcttttcttttttcaagctcctgttttattgcattttgcgccttagttgatatcccgatatttttcatctctttagaagcttgtcattgcaatctttttggatttaatttcttagattttgctttaacacaaccccttcttgttcagtgtgggagagagtctgtaaaaaaggaaagagtctccgcttattttaacaacacttcaagttttgctttggttcaagcgcataaattccatcagcttttaatccattcaccaattgaaatcgaattactgcattcgctgttttcgctccatatgctccatcaatcccgaagttcttccgctttaataaagggccgacagcgccgttcgaatctgttttacgctctcccctcgggttttaatgggcttttgacttaaaaaaccggaaagcaaggggaagtatgatttcttgccttaggatggagggccccctgtatcacttctttatcatcgacggcaaaatgatatctagtcgattcactgctaccggtcatataactgatttcattagcggctgcatgcgtcatttcctgtgctgtgaatgatttccagattttcgctgtatttttcatacaaaactaaatattccgtttttcaaatacaaaaaaacagcaggattaaccagctgctgatcgttatcactttagccgttcagtgatacggaatttctgtatttctctgtaatgaacaggtttcggcaaagaccgccgccttaaaggcgatgttcacctcccttgaagtatacagcgaatgtacttcaaaatcggcccaaaaaagcagttccgtccccaattcgtccccaactcgatgaatgatgacaaaatcaataaataagcaaagtaaaaaacccttgcaacgcaagggttttggctatgattccgactgggctcgaaccagcgacctctaccctgtcaaggtagcgctctcccagctgagctacggaatcatgatatgtatgtgttgctgggtatgttgttgtctctctgacatttataattatatatcctgatttctcattcgtcaacactttttttatctaaaataaaaaagggcgcgtcgcaaaattgacggcacccttttcgtttatgatctcacttgggcgggggttatttttttcaatgcctgttcgaagtcgcgttctaaatcttcggcgttttcgactccgacgctcaggcgcagaaggccgtctgtgatgccgcgtttttccctctctgatttcggcatggcggcatgcgacatggctgcagggtatgagagaatggactcgacagcgccgaggctgacggcaaataccggaagcgatacgttttcgaccagctttttgacggcttctttgctttccaattcaaaggacaggacggcgcccgctccgctcgcttgacgtttatgggtatcggctcccgggtgtccggcaaggccgggatagtaaacgtttttgattgcgggatgcccgtcaaaataggcagccagccgctcagccgtccggctcgctttttccagtctgacctgcaatgtttttaagcctctcaatacgagccagcagtcctgaacaccgagcaccgctccaaacgagttttgcagcttatacagctgattgccgagctcttcatcttttacggcggcaaggcctgacagcacgtcactgtggccgcttaaaaatttcgtcgcgctgtgaagcacgatatctacaccgagatcaagcggacgctgcagagcaggcgtcatgaatgtattgtcaaggtatgtcagacagccgtgttcctttgccagtttgacgacgcccttaatatccgtgatgccgagcgtcgggtttgacggtgtttccatataaatggctttcgtgttcggccggatggcgcaggcgaccgcttctgtgtccgtcatatcgacaaaggtatgttcgattccgaaacgggacagaacctcagtcaccatgcggaatgttccgccgtacacatcctccgtgacgagaacatggtcgccttgggataagagcagaaacgccgtcgaaatcgccgccataccggagctgaaagcaaaacctctcgttccgccttcaagacctgcgatcgtttcttcaagcgctgttcttgtcggtgtgcctgatcggctgtagtcatatgtcccgaattcttcaaatgaagactgatggaatgtggaagcatgctggatcgggacgctgacggctccggtggctccgtctgttttaaatggattgtgcacgagctgggtttccagcgtccaattgtgattactcatatgacacggccccctcttttacttgctgtaatgcctgctttacatcccgcttcaaatcttctgcatgttcaatgcccactgaaaaacgcagcagacggttgcagacgccgtttgcgatacggatatcttccggaatgtccatgtgcgtctgtgtcgcggggtatgtaataaaactttccaccccgccgagactttctgcgaaacagatcgttttcagcgcctttaaaaacggattgacccattcttctttttgcagccggaaagacagcattccgccttttccgggatataacacgtcggcgatttcctcttcctgttctaaaaattctgcaagttcaagggcgttttcttcatgacggcgcattctgagtccgagtgttttcatccctctcattaaaagccacgaatcaaacggcgggagaacggcgccgatcgcattttggtgattaaacatgatgtcgccgagctcttcatccttaacgacagccagaccggcaaggaggtcattgtgccccgctaaatattttgtggcgctgtgaatgacgatgtccgctcccagttcaagcggacgctggatgaccggggtataaaacgtattatccacaatcaaaagcaggccggcttctttcgtaatccgggcgattttttcaatgtccgcctcctgcattaacgggtttgtcggtgtttcaacaaatagcgctttcgtgttttccgttattttggagcgtaaacagtcttcatcgctgaaatcatcgtaaataaagcttaagccgtattttctccattcgttttcaaacaaacggtacgtgcctccatataaatcggaggatacaatcaattcatccccgcttttaaataaagccataatggtttgaatggctgccattcccgagctgaaagcaaatcctctcgcaccgttttccaacacggcgatggcgtcttcgacgagctggcgtgtcgggtttttcgtgcgcacgtaatcaaaacctgtagattctcctattcctctatggcggtaagcggtggacagataaatcggcggactgaccgttcccgttgcttcttcgcttctatttccgatttgggctaattttgtttcaacatgctgcgtcatcagtaagcaccatcctttttcaaaaataaaaaagccccctcttcataagaagaaggagcttttctcttcctcttatcttccaagcgtgaatcgcttgctggatttagcaccttggcactttgccttcccgcggcaaagcaaaccggttgctgaggtttcaaagggccagtccctccacctctcgtgataagaatattgttttgtattttctgattgttctatattaacgcactataaaatagatttcaacaactttttatttatctgaactctcgcaagaagtgcatctgaagaaagaaatttctaataattcatggtacaataggaaaaaaccatcaagacaagaagcggcctggaggaatgcgaagtggcatcaaaaaacggaatcattcatgagaaaacacttttctcccatgagcttgaagaggaaatgaccgttttggtctacctgcccgccaccttctcccccctgtataaatatcatacggtcatcgctcaggacggccatgattatttcagattagggagaatcgggcgtcaggcggaagagcttatgtcaaaaggggaaattgaccgctgcatcattatcggcgtcccttataaaaatgtgcgggagcgaagaaacacataccatccagaaggctctaagttcgcctcatataagcggtttatcgccaatgagctcgttccttttatcgacaaagaatacccgacttatcaagtcggatacggccgcaccatgatcggggattccctcggcggaaccgtttcgctcatgacggcgattgactatccgaatatgtttggaaacgtcatcatgcagtctccgtatgttgacgggcacgtgctggatgccgtccggcagtcggaggatctcaaacagatttccgtttatcatcaaatcggagaaaaagaaaccggcgttcacacgacggacggccaggttcttgatttcaccgcgccgaacgaagagctcaaacagctgctggaaagcaaacagtctgaatacacgtatgaaaccttcgacggggatcataaatggacctactggcagccgctcatcacgccggcgctgaaaaaaatgctgtaaccattcatttaaggagggaactttcatgaaatacggtattgttttatttccatcaaaaaaattacaggatctcgcaaattcgtaccggaaacgctacgacccgagctacgcgctcattccgccgcatctgacggtaagagatccgtttgaagcgacagaacaggaaatcgagcaggtcgtatcacagctgagacagacggcgaaagagtcgcatccgctcgttctgaaaatcacaaaatacagctcgttttctcctgtgaataatgtgatatatatgaaagcagagccgacggaggaattaaaatctctgagtgagaaatgctactcaggagcattatccggcgagccggaatacagcttcgttccgcatgtcacggtcggccagaagctgtcgtcagatgaacattccgacgtactcggacagctgaaaatgcaagacatttcccacgaagaagtcatcgaccgttttcacctgctctatcagctggataacggctcatggactgtgtacgaaacatttttattaggcggaggagaataactgcttggaatccatcatcgtaaaaactgaaaaacagctgaacgacgcttttttcgtcagaaaagaggtctttgttaaagaacagcacgttccggaagaagaagagattgatcaattcgaagacacgtcagagcatatagtcatatatgacggcggccagccggtcggagccggcagatggcgcttgaaagacgggcatggaaaattagagcgcatctgcgtaatgaaaagccatcgttctttaggcgtcggagccatcataatgcaggcgcttgaaaaagcggcggcagccaagggcgccggcagctttatcttacatgcgcagacgcaggcggtcccgttttacgaaaaacaaggataccgcgtcacatccggcgaagaatttctcgatgcgggcatcccccatctggaaatgataaaggaatacaaacaataaaaacaaaagcactcctgttgatatggcaggagtgctttttttatgaaaacaataccgtttcatgaattttattgcattttatggaaggttaatgtatgtttagtatacgaagtattacaattcatacaaaaaatacaattcatatttcggagggataaacatgacggcaccaaaaggaaaacacatattcgggactgttaaagtgggcacaaaaggacagattgtcattcctaaagaagcaagagatgttttcgatataaatccgggggattcactgcttatgcttggggatgaccagcaaggtatcgcacttgttaaacaagaactctttttcgagtttgcaaaagatattttaaacgctaagcaaatcgacgcagatagcgaggatgagtaaatgcacgcgattgagctgaagcaattaacgaaacattataaagaaaccgccgccgttgaccgtcttgagttctcagttgagaaaggggaatttttcgctttactcggtgagaacggagccggaaaaacgacattaatcaatatgctttgcggactcctttctccggatgaaggtgatgcatcagtgcttggacacagtatttcgactgatttggataaaataaaaccgaaattgaatatgtccccgcaggaaacagccatcgctcctcatctaaccgtacgggaaaacttagagtttatagccggagtctacggaattccgaaaaaagaagcaaaaaaaagaacagatgagatgctcgaattgtttcaattaaaagagaaagaaagagcaaaaaccaaaaccttatcaggaggaatgcagcgccgcctcagcatcgcaatgggcatgattacgaaaccggatatttatttcttagatgagccgacattagggctggacgtccgttcacgccgcgagttgtggaaaaatcttgagacattaaagggagacatgacgattattttaacgacacactatttagaagaggctgaagcactggcagaccgtatttgcattttagaaaatgggacattaaaagcactgggcacggcggaggatctgaaaaaacaaactcattcagccacatttgaagatgcctttttagcgatttgtgacggagaggcgggtctttatgcttgatttcgccattcgcaaccgcaaagagatttttcgtgatcccttatctatcatccttggaatcgcactgcctgttattctattgtttctgtttacggcgattgaaaaaaatgcgccgcttgatacctttaaaattcagcatttagcacccggactcattgttttcggtttcgctttccttacgatgttctctgcattgctgatcgcaaaagacaaacagaccgcccttttgacccgtttgtttgcttcccctttaaaaacagccgattatgtcatcggttacgcactgccgatgcttccgttagccattttacaaatcgtcatttgttttatcgcagctgctgctgccggtttatccgccgagtggatgaatcttctcgcaggtatcgctgtcttgctgccgattgcgatgatgtccgttttcttcggtttatgtttaggggctgtgtttacggacaaacaaatttcaggtatcggaacgatttatattacactcgtgcaatttctgggcggggcttggatggaggtgagcctgctcggtgacacattcaaacatatcgcttatgccttaccgtttatccactcgatcgagctggctcaggaagtcatatccggagattattcttcctttcatcagcatatttggccgatagcgggatataccgttttggcgcttgcacttgctttcctcagttttataaaaatcaggaagagttaaaaaagccggcactccgtaatgggagcgccggtcttcttttttacgtttctttcagaaggcttatcgtatgcggcagcagacggtcatcccccggactgccatggcccggaacgacaatgctgatgtcctgatatcttttcatgactttgcggacggcgcgcggccactgatccggataaaagcccggagttggtatgatttcctttgtttctaaagccttgattaagcaaccgccgaataagagcttatcctcaggcagccagacggtaatattgtcttccgtatgcccttttcccggataaaacgtttcaattttcatatcgccaaactgcagctttgtcacgtttttcaaatctccgagcggccggtcatatccctgctgccgggcgaagtcggcggtcagcttcgtgctgtgcacctttacaccgtatttgtacagtgtgttcagcccgccgatgcgatcgtcatgggcgtgtgtcacaatggcatcggtcatccttttgccgggaaaccgctgttttatttgtgtcattaattgctctgtgagactgtcattccacggagtatcaatcagtacgattcctttggaagtttcaagaagcaatccgttcgcagggacgggacttccgtctgccgtaccgatgcttgtatgcatccagacatgcggcgccagctgtgtgagagtgacatcttttgctgcggagctctccgccgcgtgtgccggtttcattccggcagtaaagaggccgaatagaaataaccccgcaattaataatgaaagctttctcaaattgaatcattcctttccgcatctttcatatatacggctcaaaaaaacccggagatttccgggctttttcacacatattgatttatcaaccggccttttcccataatttgcggcagacgggaaagagagcgcttacgtttttcctcatgcattttcttttctgcggctgcggtgttttcctggcggcgctccacctctctgtacaccctgtcattggcgagggcggccgctttcgtaatgccggcgtaatcaggcttataacccgctgcccggtttgcgtattgagaatactgctggttttgaatccgtcctgcataaatcatatgtacccctccccttcgcttttcatttcccttaatcttactttttgaaacgcggttcttttgttatgatattctttgtctatcaaatggatgaacaccttttaatgggaggacccctttttgaaatgcgcccgactgaataaccgaacgatacatttacatacatattctagagaacattaccaattcctttttgaagaagctcagaaaggaaatattttttgcgcacattgtgaccagcctgtcttgatgcggctttcgattttagagcagccggcattttatcaccggcaaaagggagacttcaccgcctgtgaaaaagcatgcgccgccgaggaaccacaagcggagaaagaaaaagaagagtataaggaggcaggcatgttccgcctgccgaaaggaaaagcgatttcagagaatccgaaaccgatcgtctcagaatggaaaagcccgaaaaaagtgcctgcggccgaaccgttttcaccaacatccgaggcagctgatacatctttgttccccggcatcggcctgaaccgcgaacagatgcgggcagtcacggaaacggacggccccctgctggtgcttgccggagcgggaagcggaaaaacaagggtgctgacagcccgcgccgcccatatgattgaacacctcggcatttcacctgagaatatgctgcttgtgacctttacgacaaaagccgtcgccgaaatgaaagagcggatggcgaatgagtacgggctggcagccggaaaagtctcccgtctcgtgaccggaacattccacagttttttctataaaatactctatcattatgattcttcaaaatggaacggcagccagcttttaaaaatggagtggcaaaaagagcaatatgtgaaaaaggcgctctatgaagaaaatttggatgaaaaagagtttcccgtcgaccaggcgctgcagcttatcggctgctggaaaaacacgtatctcccccatgagaccattccgcttgcggacgactgggagaaaaaagtgtaccggctctacgaacattacgaacggcagaagcgggaaaaacggcaatttgattttgatgacatggcccaaggctgttatgaactgtttcaaagccggcctgatattctcgcgcagtaccaaaacagattttctcatattttgattgatgagtttcaagatattaatcctgtccagtacaacattatgcaaatgatcgcaagcccggagaataacctgtgctgcgtgggtgatgacgaccaatccatttatgcgttccgcggcagcagcccgtctttcattcttgattttcaaaaggattatccggcagcaaagaccatttacttaacggcaaattaccgctcgccgcatccgatcgtctcaagcgctcatgccgtcgtaaagaaaaataaaaaacggtatgaaaaaacactttctgccgtcaaagacggcgttcacaatcccgtgatgttttatccttacgatgaagaagaagaagcgaccatgatcgtttcggatatgaaagagaaaattcaaaacggggcgagtcctgatgattttgccgtgctttaccggacaaacagcgccggacgggccatttatgaaagactgcaccaatcatcgattccttatcatgccgaccgtggcgtgcagacgttctacagccgcagaatcgtacgccagatcctcgcctacttatatgcgagtcagaatgaagatgatacggatgcggtgaaagatctgctgcccgccttatttttaaagcaatccgccctgcaaacgttaaaggcgctgtcaatcacggaagattgcacgatgattaaggcactgacgaaactgcctgacctgaagccttttcaaataggaaagatcaagcagatcgttccgtttttcgcaagcatccggacaatgaagcccgttgaagccatcacctttgcagaaagcaaaatgggtttttccgagtatttaaaaaaacggggcaatgagggaaacaaactggaaaaaggctctgatgatctcagggatgtcaaagtggccgccaaaaaattcaaaaccattcccgattttcttgcgcatgtcgatcatatgcgcgccgctgagaatcagaaaaccgatgaaaacggcgtcgaactgctgaccattcaccgctctaaaggtcttgaattcaatacagtctatattttaggcgcggctgacggctcgataccccatgacttcgcgcttgagacagcgagacagggcgatcccgctccgctcgaagaagaaagacggctcctgtatgtcgccatgacaagggccatgcagcatttatatgtatcttgtcccgcgtacaggcggggaaaaacagcgcgcagctcaagatttctcgagccccttcttcggacggacagacggagcgcactcaggatataaagaacccggcagatcactgccgggttcttctcacataaaaaggcctttttagcaaggccggctgacgcctatttattgtttaacattttagaaatggtgccaaaatcaagtttctctttaccgcttgtaatcgattgaacgattttgtcttccaattctttcggaacacgcttgttagccagctgggacaccttctgaatgacgcctctcaccgtgttttcatctttgaaattggcattttgcaatgatcctgcaaggttcatgacatccttcatgctgacgcctgttttcttctcaatatttttaaaaaattgattatccatggtgtgcctccttttgtggagtaatacgatattgtatgaataaagggcggaacgtgtgcccgtaagacaaggaaaaaattccgcatctccttctctatccttcatacattagggaagcacgggactgaacggtcccgcgcttatccaaagtcttgctaaggtttagccaaaaaaggatgcaccgacaatgatcagaaggatgaacaatacgacaacaagaacaaatgttgagccgtatccgcctccgacatagccgcctccgtatccgcagccgccgccgcagccgtaaccgccgtagccgccgccgaatccgccatatccgaatcccatatttaagcacctcctttactctctatactctatgtgagccgacttgtttggcttggataaatgcatagggccggtgcggatttcttttcattttattgagaatgctcatttttcttcagtttcgcttctgtttcggcggcaaacacatctatccattcctcaaagcgcgctcccgcttcatcaaactcagacagctgtttttcaatagataagatatagttgtcatgctcccgctgattttgattgtgccggcggtatttaccgtttatgaatgattcaaatatattcataacatcccctcctcctatgatctatgccgggcagaggccggcgttcggcaaaaaacaaaaaaaccggaagctccggttttttttgaaaacggctatttcggttttttcttttggccgcagccgcagccttttttcttaatttttttttcgtaaggctgatgcacagttgatttgtatggagagtgttgggaaggtttgcttgattgattcatggtgatccttcctttccttatgtcatatatgccagtttatgccgaaagtgacggtaagttgctggtggaaccgccttattcctgcagaagacgagaaaccgcagcttcaatgatcccggccgcgccggctatggctaacagcaaaatcagccattgcgcagcctcggggatcacaatctgcgccgcaattaaaaaggcggcgcaccatacgcccgtacaccaatagcagctgagaagttcaccgataaatgccctgatgccttttccttttatgacaatgtaggtttctgtcgtgccgtcgggtgcggtttctgttttttcctcgtgaaaaaggctccgaagcggcgccataatggtgtcaaatacgaaaagcctggccagccggaaaacggcaaacgataacagaataaatgaaagccaattgataaccacctgttcactccttttcaaaacttgacctctttatacatatgcgaaaaccctgatcttcatgaatcgcaccttgtccggtaaaaaaataggtgcggtttagttgtttttcttattccgctcggcgtttcatttgcattatatagagtatgaatgagaaaggagtgaaggttatgtcgtttgaagaaaaagtcgaaacactgcaaccgcaaatatacgaacaattatccaacgaattcgagcagacgatcgaagtgattgattgcgaaaatgtcacaatagatacaacacatataacggccgctctttctatacaagcctcagttactacggcgattatcctcgcgacacagctcgcgatcgcagatgaagacacagccgaccaaatcgcaaccgaactgctgatcctggatgattgccaaataaaaaagaggaccgtcattcaagtcctgaacagccgcaatattaaaatcacactgacagcagacgatatcatggcctttgtacaaattttgtttcaattattaaatatactttttgctgaactagacatcctttaacctttcttttcaaatatttaaatagaggtgagaacaaatggcagataacgaaaaattaaaaaaagaactcgaaaatctaccagaagtggatccgcttttaaaggtgcttgtcagcaatgtcttcaaaaaacacggcgtgacaaaggataaaatgcgggaaatccctgatgaagaaaaagaaatgctgatcgcattagtcaaagacatgcaggcgaaaacagaagcttttcttgaaagccagaaacagaaaaaagagcaggaaaaagcgcaagaacagcagacaaatccgcaaacccgcagagaacaattaatcgaacagctccggcaaagacgccaaaatcccggtcaataactaaaaaatagtgatttttatcaggatagatgcctgagtcaaaataaggggccggctcatttaataatagtaaaagaaaaggaggaatagatatggaaagcagaccatactcttgggttgcacttgatcctgaatgcgaacatccgcgagaagaaaaagaagaaaaagaaggaagaagatgcagtgtttgctgtaacggacatggatttggcgaagataatgccttccttgaccaagacctggctcaggcgaatatcaacaaacaagtttctgaagaagcgattattatcagagactcttgtgatattaacgtaacgtcaacagacgttcaagcagtcgcttcagtcatgacagcgattaatgcagcagtcgtaacggccactctcacttcaattgctgacggagtcatcgctgaattggtcgcacaagacttattgcagctaacagctaacaaacaaatcaaccgtcaaaaattgctcatcgaaaactcccgcggcgtaaacgtgacaacagtagatgccgatatcgcagtgttgatctcaacagcgacaaatttactgattgccgtcttagtcatcacccttgtcctctaaaaagaaaaagcagagctaaaaatgctctgctttttcttattttctccgcatatgatgaatatatagacgttcacccacaccaagtgaggctcgcgtacatatgttgttaaagacaaaagtcaaataccctaaaagaaggagctgaaatccatgagctgcggaaaacaccatggccgagatgaaagttgtgtatgcgatgcagtcgagaagattttagcagaacaagaggctgttgaagaacaatgcccgactggatgctataccaatctgttaagcccgacggttaccggtaaagataccatcccgtttctcttgtttgataaaaaaggcggtttgttctccacattcgggaacgtcggaggatttgcggatgacagccagtgcttcgagtctattttcttccgggcagaaagagtttgtgattgctgcgcaacgctttcagtattgcgccccgtagatgtgcacggcgacaccctcagcgtctgccatccttgtgacccggatttcttcggtttagaaaaaacagatttttgcattgaagttgatctgagctgcttcagcgccattcaatgcctttcaccggagcttgttgaccggcctgagccgcacaaagagaaaaagcatcacggatagtcattgattcgcatctttcctaaagaagaatccccttccaaccttctattacagatgcaatcatcagcccgcccggacttccgggcggctgactctccgatatcgtttaatccggtatataaaacgtgaagtcaggagggatattatgagcaagcatacaacatactgtgtgcgtgaagcggtagaaaatattgaagacctgcaaaatgcggtcgaggaagattgcccggccggatgctattccaaccttttatcgccgggtttttcattaggcgatacagtgccgtttgtacttttcacttctaaatcatcaccgtttaccgcattcggaaatgtcggcgagctggataacggtccgtgttttaacaccgtttttttcagagttgaaagggtctgtgacggctgtgccacattaagcctgcttattgcttttgacgagcataagcacattcttgattttacagataaagactctctctgcgatgtattccgtttagaaaaaacgaactattgcgttgaagtcgatctccatagcttctgcgccatcaattgcctgaacccgagactgatcaaccgcacacattcttaaatcaaaaagcataaaaataagctgccggattaaagaattcaggcagctttttgtatggttaaaatccaagcggatgcagcgaggtaatatcgtctattgcgagttctgccggcgctccgttgcttgtcgtccgcaggaagatcgcattattttttcttccgacgattacgcctctgtaggttttcccgttggcttctatcagacaaagggtccgcggcatattatgcggcagcttcgttaagaaatcaattttttcaagaatggacattctgctcatcggctttttcacgcgctttggcgggaccttttcctctggggcggcattgtgaaccgcttcaggctctttttcagcggcttcaggctcttttttagcggcttcaggcttggcagtgtcctgctccgcttgcgccggaacttcttgaacggcttcttctgagcggctgtgctgttcaggtacttgcttttctggttcgacagccactgctccttcaggctgagttttacattcttcctcccgctttccatgcatcggctcttcttccggcggctgcggcgctttcctttttttgattaatatgtcctgcattgatgattgcgtgtctgaataatccgcctgaacaatatacatgagcggttttttttccgcgtttctgttttgttttgacatcttcatccctccgattctgtcatgttttatttatatgacggaatgattaaaatcagaagaaagaaaaaagcaatccctgaaagggactgcttgttatttaacgtgcggtaatatggaatcctgaatccacgtgaagattttcgcccgtgatgcctcttgacaggtcactgaacaagaatgcagccgtgtcgcccacttcttcaggtgttgtcgtgcggcgcagcggcgcgcgctcttcaatttctttcaggatagagttgaaatcactgattccttttgcagacagcgtacggatcggccctgctgaaatgctgttgacgcggatgttttcttttcctaagtcagcggctaaatatctcacgctcgcatcaagagacgcttttgccacacccattacgttatagtttgaaacgacgcgctctccgccgaggtaagtgagtgtaacgatgcttccgccttcagtcataatcggacgcgccgcttttgcgaccgctgtcagagagtaagaactgatgttatgcgcaagcaggaatccttcgcggttcgtatttaaatattcgccgacaagctcttctttgtttgcgaacgcgatgcagtgcgcgatgccgtgaatcacgccgacctgctctttaatgcttgcaaagcaagtttcgatctcagcgtcatttgtcacatcacacggaaggatgatggaatcatttctttctaatgtagccgcaaggtcatgaactgatttttccaagcgctctcccgcgtaagtgaaaatgaggcgcgctccggcttcatgcagcgaacgggcgattccccatgcgatactgcgtttattggcaacgcccatcacaacgatgttgcggccttcaagtgagaaattcatatgtataaagcctcctgtaatcgtcttaaagacatagttttagtacctgatcttaatttttatcatatcataaccttgtccagattgaaagcatgggaaaaagaccgcggatgttgaagcggtctcttttttatctcgtctgcagactgttccttttaaaggcaaaatgattggtcgggccgtgtcccgctccgatgccgagtgtatgttccacggcttcccgcacaaaattgacagctgtctcaaacgcggtctgaatgtttttcccctttgccgtttctgccgtcagcgcggctgcgaacgtgcagcctgttccgtgggtgtgtttcgtgtcaatataagcgtggctgatttgggtaaaagacgaaccgtcaaataataaatcaacgattctcccctgttcaggctgatgtccgccttttatgatgacatgctttgccccaagcttgcaaaggcgttcggccgcttttttccggtcctcaaacgtgcggatttccatccccgtcaatacctcagcttccggaacattcggcgtcaccgcatagctgcgcggaattaacagctcttttaacgcggcctgagattcctcacgcagcagggaagcgcctcctttggcaatcatgacgggatcggtgatgagatgatcaagcccgtactgatccgttttttccgcaatttccgcaatcatttccgcgctccacagcattcctgtttttacagcatcaggccgcaaatcttccgccaccgcgtcaatctggctgcccagcgcctcccgggtgagcggataaatgccgtgaacgcccaacgtgttctgggcggttaccgctgtaagggctgacatcccgaaaacgccgagctcctgaaaggttttgagatccgcctgtataccggcgccgcctcctgaatctgatccggcaatcgtcaatgctttgcatatgctcatgatgtttttcgctcctttcacattatccgatccatttatgataaaaagatttcgctctgctgatatcacttgtgccgtgtattaatgctctgccgtcacgaaacagtaccatcttgaaattgtctgtgcaaaatgaaattaaatacgggttggctgaaacatcaagccctgcccgtctgagctgtcccgcaagattttgcagatcaaactgttcggaaatccccgttctgatctgcaccgtgttccgcccgcacagaaccgccgcttttgtctgattttcataggataaaaacggaaaatcgtttgtgccgcagcttgggcaatcagccgacttaagacgggcgacgtttatttctgaccgttcatttttccataaatcaaaggaacggagaacatgctcgatagatccgcccgttaacagcttcagcgcatctgctgcctgaaaaacggccgtctgcaatacagccgggctgatgattcccgccgtatcgcatgtcataccgcctaaaggcaatgtctcaagcagacagtgaaggcacggcgtgacaccgggaatgacggtaaaagagagcccgtagctgccgacacaggcgccgtacagaaagggaattcctttctgcacagccgcatcattcacaatcagcctcgtttcaaagttgtcggcggcatccacgatgagggaggcatcacgaatcaatccgggtgcgttttccgcagtgacatccatgacaaatccctcgacctctacatcgctatttatagaccgaagccgtttttcagccgccgcggctttcggcatttcctgtctgacatcgtcttcggtataaagctgctggcgctggagattactccactccacataatctctgtcagcgatcgttaccttcccgacccctgctctgacaagcatctccgcacttgccgtcccaagcgcacccgcgccgataatcacggcatgagacgaccggagcttctcttggccggtgggaccgatcggctgaaacagctcctgtctggaatatctgtccgtcataccggaagaccgtctcgcggactgcttgcagttccgtaatctttcaccggaattctcccggcttcataagaaagacggcccgcttctacggcaagcttcatcgccctggccattttgaccggatcatctgcgcctgacacagcggtatttaacagcacgccgtcagccccgagctccatcgcgtaggcggcgtcttttgaagatccgacgccggcatcgacaatgaccggcaccttcgcctgttcaatgataaaagaaagattcagcggatttaaaattccctgaccggaaccgatcggcgaagcgcccggcataatggcatgcaccccgagctcctcaagacgtcttgcgagcacgacatcatccgacgtatacggaagcacgataaatccctcttcgagcagctgttctgatgctttcagcgtttcaaccggatcaggcaaaagtgaccggctgcatccgatgacttctacttttatcatgtcacaaagccctgaagctttggcaagccttgcgattcggaccgcctcttcagccgttgcggcgccggccgtattcggcagaagcgtgtatttagacaaatcaagctgttcgagaaagttaggctgagactcttcaaagatgttcatccgccgcaccgcaaaggttaaaatatctgattccgagacggccaccgcctctttctgaatctcaaaactcggatattttcccgttcctaacagcaatcttgaccgaaactgttttccgcctattgttaacatcctcatccgcctcctacaaaatggacaatttctatgacatcgcggtcacacaaacttgtattttcataattctttttttcaatgatttctttatttctctccacaactacgattctttggtcaagctggtacgattcaagcaaatcctgaaccgtcccctcttttcgattccaatcaatttgttttccgttcagctgaaggatcatatatgaacagcctccttgcgatcgattcgaaacgcttcttcccattcctgtttaatctgtctttccatgatcatatcccgcaccatttcagccgttgccggcgccaacaggatgccgttccgaaaatggccggcggcgaagatgatgccgctgtcttcagggtgttgcccgataaacggcttgccgtctcttgttcccggcctgagccccgcccaaaaccggtctattttcatatgttcgatggcgggaagcatggttttcgcttttgcaatgacggcctcaattcctccgatgtcaggcgtatcgctccagtcgccctgtttcatcgtggcgccgatgacaagccggccgctttttctcgggacgacataacaatgatcatggtaaagggttttggtcagcggggtatcgtcattccacacggaaaggcattctcctttcacaggaaaaaaaggctgtcccaagccgagccggctgaaaaaccggccgctccatacaccgcttgcaactgcgactttgtcagcataaacatccccgccggacgttgtgatgcaatattctccgttcacccgttttacggaagtgacttgtgtgtgctcatatatgtcagcgccatagcgccgcgctccttttgcatacgctttgcaaacatagtacggttcgacatggacatcgtcttttataagacttgcgccgagaatgtcttttgaagcgtaaggctctttttcaagggcatcttccgctgaaagccaagtgacggaaggcagatcatccatcttccgtaaacgggcgatatcttcttcggtatacgccagtttaagcattccgccgttatggcgcctgatgtcaatgccgctagcttcctcaagctcttgccccgccgcttcatacagcctttgactgtgcatggcaaaattaaaaaacgcatcccggttttcacattccgcatgagcacccagcattcccgcggcagcgcttgtcgtttttcggccgacttctccggcttcaaacaagacaacgttctgctgcgtcttcgccagctcataagaaatggcacacccgataattccgccgccgatcaccgccgtatcatagtgctgcttcataatcggcctcccttaccgcacgtgcataccgttttgccgcctcctcgggattttcagctgagaaaatgcctgacatgacggcaattccgtccggcttcgcctgctttgtgtgtccgatcgtctgcagtgtcattccgccgattgcgataacggggatggaaagcgtgcgtttgatctctgaaagcaggctgatgcctcttgcttcaagtccttgtttacattcggtttcaaatatatggccgaacaccacataatccgcatcttccttttcagcttggatggcttcttccagcgaatgaaccgaacgtccgatatgaagatggggaaatctgcttcgcacctgctttacggaaaagctgcgggacggaagctgaacacggtgtatgttggcaaaaagcgcgatatccgccctgtcattgatgatcaatttgtccttatccgcaccgccctttttcaaaagggacaaaagctgcatgatctctcccgctgttttatcccgctcacggatatggataaagcttacttcgcgctgaatcgatagaatatcctcggccagctcggcaacgggtttgcgattatcagttaccgcgtgcagctccaaaggattccacctcttttccgtccttctcggaccagccttctttttgataagccattccccaaaattgatattcataatagcttgaaatcacaaaattctctttcattttcgcgcggatttcctctgtgctgttttcagcaatctcgtcaaaacggctgatctgttcttcgacctgctgtctgaaccagtctccgccgtatgtaccgatccatttttcataaatcggatgctccggtttgcactcttttaggtgttcgccgacttcataataaagccaataacaaggcagaagcgcagctaatatttctccaaaattgccgctcatcaccgacctgtacatatgagacgtataagaataggcggtcggtgccggtttaaatgctgcacgctcttcttccgtaattcctaaaagctccgtaaactcgcggtgcagcgccatttccgcttcatatgtcccttgagcgtggcccgccatcctgcccgtcgtaaacaagtcttcggcatatgcggcgccgaacgcctgaacttttgcaaaatgcgtcaaatagtaggaatcttgcagcacgtaatagctgaaacggtctatcggcaggcttccgtcaccgattcccgttacaaacggatgaacaaaacttccgtcccaccattcggcagccgcctgtctgcattcttcagaaaatgtcatcatgtcttcccccctgataaaataaaaaaaccactttcccgcatcggaaaagtggtttggaatttaaatggataaaaggaaccccaaaaaaataccgctccacttccctacgcaggtctgaacctgttcaagttatgagggtctaaaagtctcacttttatctcagcccttatgaaggacacccctagtggtcatacgattaatgatttatttgttatgccttctatattatcacgaattgcaatttggtcaagcttcaaggatttttctcagttctgacacgtagttgcgcgagcctgtgacgatgagacggtctcctgttttcagccgtgtgtctccgtgcggaacgatgctgtccacacctctgaaaatccggacgaaaatcacatcgcccatcagcggaaattcccgcagaatgatgccgttatacgccgggttttccagattgatctgatataacgaagactcctcattcgtcaggaggctcatcacgcccggcgcctcaattaacgcgcgcagcagcgtttttgtagacagaaggatagaaaaaatactgatgccctcttctttcagttttgtttcatgctcaaccgagccgacgcttgcgatgatacgctcagtccctttctctttcgctagtaaggcgatttcagcgttcacatcttcatttcccgtcgccacgacaagaatatccgttttgaaaataccgtgcgactcaagcgtgccgggctcgtaatcagaaatcgtgtcaaccgaaaaaacggattccgcaagcgtttccccggcattttcctgatacacatggacgacccgtacttcatattcctcctcaggcaattccagcgtaaccgggagcgtcatttggttggcgccgataaatgtaatgcgctttttttcctgcggcgcgctttgccgtttgaataatttcttaaagccgatcggcgtgatgatgctggcaataaccgcaactaaagtcagcgcgccggacatattggcgctgataatgtggagcctttctccgatcgtagccgccgcgataacaagcgacagcgtggacgtcagcaaaaagcccgaagcaaacacggttcttttgtcgtaccatttctttaaataaaacaccgggaacattttgctgataaacagcgcaagcagaagcagcggaatcatcgttaatgttttcggatcttggaaaagcgtccaaatatccaatttcaccccgaccatgacgaaaaagatcggaattaaaaacccgtagccgaaggaatccagctgttccaccatttctttattcggagacagaagcgataccagaacgcctgccaaaaacgcgccgagaatattttccgccccgagagattccgataaagcgacaagcacgataatcagtgtgaaaatggctctcgtgccgatctgcacagtgcctttagacatcgactgcacaaatgaacggtgtttaaagatcctgccgaagaaatacagcacgacccccgcggcaaagagaatcaacagaagccacatatttccgctgtcttctccgtaaagagaagagaagaaagcgagcagaatcattgtagccaagtctgcgataacggcgacaagcaggatgatctggccgatattggagttcatgatccgttcttcctttaaagtcgggaccaccacaccgagtgatattgttgaaataataagcgtcattaaaaatgcgttttgaataaaaccggctaatacaaaggcataggacagcagcaatgataaaataaagatgccgaaaaagataatcagcgcggcagaaaacgtgttgggcgcttccttgccgttcggaaggaattgttttttcttccctttctcaaatgaagaaaaatcaatttccaagccgcttaaaaacattaaaaagataaagccgagaacagacagcgtctccagccacgtgtctccctgaacgacaagattcaggccgctttttccgataataagccccatgatgatctccgcgacgacgacggggatgctgagcttaaaccgatgtaaaaggagcggcgtcaaaaaagcgacgatcagaacgacgactaaagatgcgactgatgtgtgttccatttgtaaatacctccttaaaacaagggttataaaagcccgctttaagcggacgaaaccttactttttttaaaaacataacgcatattctaacaaggcttaacgcgaaaaaaaagtgataaggctttatttcttcaattctttttttaatttgtaccaaaacagcgtaattaggtataggaattagccccataataaataaaaaaccgttaataaggaggctgacacgaatggcttatgacatcatcagcgatatacacggatgttatgacgaaatgatcgccttaatgcaaaagctcggatatgaagtgaaagacggaacgcccgtccattctgaaggcaggacgcttgtctttgcaggggatttaacggacagaggcccaaaatccgtagaagtgatgcgttttgtggcaaaagcatatgaaaaaggagccgtccgttatgtcccgggaaatcattgcaacaaactgtatcgttacttaaaaggaaaccctgtaaaagtgatgcacggactggaaacgacggcagccgaactgaaagagctgtctcccgccgacagaacggaagtctccggacaatttatccgattatatgagtcagcgccgctttatgacattttacataatggcgatctcgttgtcgcccacgccggcataaaagctgacgatatcggtaaatactcgcgtaaggtaaaagaatttgttctgtacggcgatattacgggtgaaacgcatcccgacggcagacccgtcagaagagactgggctgccgactatgaaggcaaggcgtgggttgtgtacggccataccccggtaaaacgcccccggatcgtcaaccgtacggtcaacattgatacaggctgtgtcttcggcaatcagctgacaggctttcgttttcccgagcatgaaaccgtctctgtggaaagctctatgccgtatgatgcttcacgatttcgcgaggatcacggcaggcaggcatgaaataaagcccgaaaccggcaaacggttcgggctttacatgtgttcaattaatgttttcatatcgtcaggcaccggagcgtgaaaaacgagcgtttctccggtcatggggtgtacgaatgaaagccgctcactgtgaagagcctgccgggcaattccctcattttttccgccgtacaatgtatcaccgactaacggatggccgaggtagctcatgtgcacccggatttgatgcgtccgccccgtttccagccgcagggctgcaagcgtaaacgcatgtcccgctttttccgtttgaaaatgcgtcaccgctcgttgtccatccggcgttaccatccgctcaataatactgtcgtgttttcttccgatgggcgcgtccaccgttccttccttctgcagcatgatcccgtgtacgacagcgagatatcgcctgctgacaagcccctttttctgtgctgccgacaaaagagaatgggaaagccgatgtttggcgatgagcatcgcccccgatgtgtccctgtcaaggcgggtgacaagatgaaccgttgattgcacgccgctttttcggtagtggctgatcactccgttagcgatgctttttgacgggtgttctcttgatggaattgaggagacatacggctgtttattgaccacaagcacatggtcatcttcataaagaatatcaagcggaaccggctcaggcaaaagcgtttcactcacatgctccttcggaaattcaatcttaagcacgtctccctccgctaacacggtgcggacggttacatgctctccgttcacaagcaggtctcccccgccgaatttaatgtcagcgagaagccgctttgaaatgccgagctgcgccgtatattctttaaccgtcatgccggcatcccgggcagtcatgttcttttggataaaaaagttgtccaatccgtttcctctttctattcgccttttccgataaaggaatcctgcacccttttccaaaacggaaaagggcggaatcttgcaaatctgactttttcatttgccacacggcatagaatggacttgacatccttatgcagcaaggttaaatgatcaattgtgacttgaaagtcgacgtcgtttctcggtttgatgacacagttatgatgatcgggaagcaaaagcggcgagccgacagtcctgaacactctgttgttgatagatgccatttcggcaagctgaatcgccctgatggaagggtggatgattgcaccgcctaacgccttattataagccgtgcttccggaaggcgtggacagacataaaccgtctcccctgaacgtttcaaacagctggcctttaatttccacgtcagcgacgagactgccttctatgcttttgatcgtacattcgttcaaagccagataccgctcctcacgctcttcatcatgataagtgacaatcacctcaagaaggggatactccacggtatgatacggcgttttggcaatggccagaacgagcttttctatctcctgcggaacccaatcggcataaaaacccaaatgccccgtgtgaactccgacaaaagccgttttatcaagacggtcgctgtacctgtgaaatgcgtaaagaagcgttccgtcaccgccgacggaaataacgatttccggctctttttcatccaaggtcatatcaaaatcgagtaaatacgcctgtattttgcttttcagtgtatctgaaacctcgtctccttttgaagaaacggcaaatttcatgccattcccctcctttccttcctactggcggtctcccgcttttttctttcgcgagaacgcggcttgggcttcctggatttctccgcggatttctgacatttcttcatcgagccgggatgcggcttctgaggcccgctgcagcctcagctttactttttcgggaatgttcccgctgtatttgtaattcagtgaatgctcaatggttgcccaaaagttcatggcaagcgtccgaatctgtatctccacaagaacgtgcttttcaccggacgttgtttgtaaaggatataaaacgacaaggtggtaagaccgatatccgctttccttatgctctgctatgtaatcccgcttatcgacaacggtaaaatcttttctggcaaacagcatatttttgacgatctggatatcatcgacaaattggcacataatacgcagccccgcgatatcctgcatcgtttcaatctgatgaagcggtatgctttttcgtctcgctttttcaagtatgctcgccaccggcttcacgcggcctgtcacaaactcaatcggtgagtggtcatcttcatactcataaagggttctgacgcctttcagcttcacctttaattcttcaacagcctggcggtatggcgctagaaattgctcccattgtttgtcatccatcgtacatcccccaattccgaacctgttctaaagaaatacgtttttcactttttcttccatatctccgtagtttgcattatctttaatattttcaagaagataatcgagttcttcatgcagccctgaaagttcaaccgttttcgcgccggcctcaaggaccgccggttttccttggtctaaggcttctttcagatccggccagacatgttcttttataatgacatattcaaaagagtcagctgattcaagtatgtatacaaaagcaaagtgatcggaatcaacaagcatttgacctgaggctttgcgttccgctccgcttaagtcttctccgcacttcaagcggagcgcgtcttctgttaatgatgcattctggatttcaattctcttttgcataatgttctccttttttaacaaagtacagcatttattttatcatatcaaggtcgatattgataaacgtaacctctaaagagataatgggaattatacaatttttcgtcctgaaaggaagactgtcatgacccaagaaatagaaattgaattcaaaaacctgctgacaaaatcagaatttctgaagctgagtgaagcactctgcatgaaagaatatgattttaaacagcaggtcaatcattatttcgacacgaaagatttttccctgaaacaaaaaaaatcagcactccgcatccgagaaaaagacggctcgttcgttctgactttaaaagaacctgccgcggtcggtctgctggaaacgcaccaacagcttgcggcggcaccggatcttgacgtcttcaagattccggatggccccgtcaaacggcagctggacggtctcggaatccgttcagaacacatttgctgcttcggaacgctgtcgaccgcacgcgcggaaaaagaatcagaaaaaggcttaatcattttagatcacagccgatatttagagaaagaagactttgaattggaattcgaggctgctgactgggatgaaggaaaacaggcgtttgaacaattgctcaagcaattcggcatcccagagcggatcacgaaaaataaaatccagcgtttttatgaacagaaacaaaaaaaggtggaatgacacagtgaatataacgaattgggcggcccttctccagctgcagtcaatggcgctgcaatcaatctctcatacaagcacggattcaggcggacaatcttcagaaagcccgcttgccaatttcagcgcgctgctcagccagtatacggacacagccgtccggcagcagccggaatcagggattttaaacggtgtgcggaccgctcacgcttcatattcaccgagaattccggtttcatccggttccgcggcagcttcacagaccgtttccccgagcataaagtctccgaatgcggcttctgacatcagcaccggaaacttttcaatagacagcgccattcagaaagcagccgaaaaatacggagtggacgaaaaactgatccgcgcggttattaaacaggaatcaggctttaatccgaaagcggtcagcggtgcgggggcaatggggctgatgcagctcatgccttccacggcagaatcactcggggtgtcaaacccgcttgatcccgtccagaacgctgagggcggcacaaagtacttaaagcagatgctcacgaaatacgacggaaatgtatctctcgcgttagccgcctacaacgcaggccccggcaacgtagatcggtacggaggcatcccgccgtttaaggaaacacagcaatatgtcaaaaacataacccggcagtattacgcgtaaaccagagaggcttccttcgccctctggtttttttgcggagtgaaatcttacacatgaatgaaggcgatgtgatatgatatgaaatacaagcgcctgacagaaaggcactttgtttgtagaaataaaatgttattgctaaaatatacagtaactgaagatagtaaaactgaaagataaattcgcaatgggaattatgattcctattagccatataaaggagtagtcaacatgggacaatcgtttaacgcaccatatgaagcgattggagaggaacttctatcgcaacttgttgatactttttatgagcgtgtctcgtctcatcccttgctgaagccgatatttccaagtgatttgactgaaacggccagaaaacaaaagcaatttttaacccagtatttgggcggacctcctctttatactgaagagcacggacatcccatgctcagggcaaggcatctcccctttccgattacggatgagagggctgatgcgtggctaagctgtatgagcaaagcgatggatcaggtcgggctggagggcgatattcgtgaatttctgtacgggcgtctggaactgacggccaggcatatggtaaaccagtcagaagcggaggatcgatcatattgacgaattatcagcatgagcaatacttcgcccattgccacggacatccaaaaaaaccgctcgaaatttacatgtttgtcgaccctttatgtcctgaatgctggtcgctggagcccgccataaaaaaattaaaaatcaaatacggacgttttttcaccctgcggatcattgtttccgcgagcattacatcgctgaataagcaaaagcggaaaaaacaccttcttgccgaagcttgggaaaaaattgcgaaccgttccgggatgccctgtgacggaagcctttggcttgagcaggatcagcctcttgcatcgccctaccttgccgcactcgctttaaaagcggccgaactgcagggaagaaaagcgggcattctgtttctccgcagcatgcaggaaagcctgtttgtctccaagcagaatattacggatgaagacgttcttttagaaattgctgaaaagacgaaattggatgttgaagaattcaagcgcgacctccattcgcaaagcgcggtaaaagcgcttcagtgcgatatgaaaatcgcggcggaaatggacgtcaccgtcaacccgacattgacgttctttaacagcctgcatgatgatgaagggctgaaggttcccggcaactattcttatgacgtatacgaagagatcttattcgaaatgctcggggatgaaccgaagccttctgaaacgccgcctttggaatgtttcattgaatatttccggtttgtcgcatcgaaagaaatcgcactcgtttatgatttgagtctagaagaagttgaaaaagaaatgaaaaaactggcattcgccaaaaaggtcgccagagtggaagcaaagcacggtctgttttggaaatctctggccggaacccaggaggatgtcacctgttgtgaccattaaaaaaagctgattccttacggagccggctttttttgtgcaaataaagaaaccgcgccgggataagcgcggtttcatatgtcttaacgacaacaaaggggatgggagaaatttttcacggtcaaacaaaggggtaatgtttgtttgtgatcaatttcacatccttatcatatcaaatcttgtcgagttttgacaagccataagattaatgttcatatttttgtcacaaaacataactgactgcttgttttcatagaatatatcaatcataaacaaggagggaaatcaatgctccgcaccgtattgatcatcggaatgattgtgtttttcttctttttaaacctgctggccatgatgcacatgctgccgatttacattacatctccactgctgtttctgtccatattgtttgccctgtaccggctgaatcaccgaaaaacgtttaaggggttttagaaaaagcctgcgcatttaatgcacaggcttttttgaattacgaagggttcactttcgaaagaagctcttccatttcgttcagtttctcttcaaacattttgcaggccgcctcgatcggttcaggcgatgtcatatcgactcccgcttttttcagtatgtcgatcggatattccgagcttcccgcttttaagaattcggtatagcgctccaccgcaggcttgccttcttttaagatctggctgctcagcgcttgggccgcactgtagcctgtcgcatattgatacacataataattgtaatagaaatgcggaattcttgaccattccagactgatttctttatcaatcaccatgttgtcaccgaaatactttttattcagatcataataaagttcgttcagcagttcaggcgttagcggctcgccttcctgcgctttcgtatgaatcagatgctcaaattcagcgaacatcgtctgtctgaacactgtgcctctgaatccttcaagcatgtggttgagcaggtacagacgctgtttttcatcctttaagctgttcagcatatattcaccgagcagcgcttcattagtcgttgaagcgacttcagcgacaaaaatgctgtagttaccgtacggatacggctgatattttctcgtatagtagctgtgcacggaatggccgaactcgtgaacgagcgtaaacagattattgacattatcatgccagttcatcaagatgtacggattcgtgccgtatgtaccggacgaataagcaccgctgcgttttcctttgttttcgtatacatcgacccagcggttttcaagtccttcttttaaaatagacgcgtattcctcgcccagcggagcaagtcctttgagcatataatctttcgcttcctcatatgttaccttcattcccgaatcttttacaagcggtgtgtacaggtcataaatatggacttcatcaaggccgagcacctttttccgcaggtcaatgtaacggtgtaataacggaagatgtttattgatcgttttgataaggttatcgtaaacctcttcaggaatgctgttattggataaagccgcttcccgtgctgatttatactttttcacacgggcgtaaaaattatctttttttacagtgccgctgagtgtagtcgccatcgtgtttttatactgtccgtatgttttatatacggcttcaaatgcgtttttgcggacttcacgattgctgctttccaggaaattaataaagttgccgtgtgtgatttgagtttccttgccgttttcatctttaatcgacggaaacgtaatatcggcgttatttaaaacactgaatgtattggaaggcgaagacagcgcttcagaggcttccgcaagcagggcctcttcttgttcgctcagcacgtgcggacgctgttttgtaatttcttcaattgcatgggagtaaagcttaagctcctctttttcaagaataaactggtgcagcttgtcctcctgaatcgccagaatttccggttcaatgtaagcagtcgcgctggcagcctgagaatacaggcttgcggctttgtcgttcagcccttggtagaaagaatttcccgtatcctggtctgagcgcatatgtgcgtatgcataaagtttcccaaggcggttcgtcacttcatcctgtgccgtaagcgccgcgtataaattatcagccgaatgagcaagcgtgcctttaaatgaagataaattcggaattaattctttaactgcttgaaattctttattccaggcctcatcactaggaaaaatatcctctagtctccatgtatgctctgcctttacttcacttctctcaggcagctgtgctgctttattttcctcagtcatggtgatccccctcgttttctttacttcaagccaattgaaaaaacgattgtttctccaaaaacttgtgttgtgattatcttccggcttttcactgccttttgtcaaatcatatgcggcatataagaccgagcataccaataatacagtgaaaaaacgaaaacaaaatgcttgtacgcccctcacattcgccaccaccttgacgttagggtgaacgaaatgaagcattctcattccccaaaaaagagcaggtcccgccggcgcagctcttctgccgtttgagggcgcttctgttgagatgagggcatatatacttcattctcaatttcccttaaaaaatcctgcaagcataagaaatcagcatattgttttaccgccattccgataaggctgtcttgtgaaccataccgcatccggatctccttatgcctgattttttgccgtaaatcatgaaccatgccggataatcggatcggcgcgccttttttagaaagttccgcaagccgcaagtataaatggccctgccacacaaaaacgggacttgcaaacacaaagcctgctgaaacgggaataaacacttcagaggggagaaatggaaatgcaacctgatgtctttcgtaaaaaagacgccggataagaccggcatcttcagataaaaaccgcccgcctttgttgcggaagccggtaacggcacgcccccacgaggaaagtctgacgctgcgccgcccttccggatgacaaatgtctttcagatttgctttgtgaagagggattgcggttaagccggcataagaatagccggtgtaaaacggagtgatggaatgcagcctgtaaaaggagcgggcgtcggggcagtaaaacattaaggaggaaaatgaattgacttcaaagaactgccagtgaaaagcagaaagccggaaaaattgcgcggtcatccgttttaaccgttttgccccaatgatccagaccggccggtacccggcgtttttcaggcctgccgtccggctctttaaagagtccgccgaaaggttcgcacattgaaattcaaaagccagcctttcttctccgctttctgccgtcaagtcaggccgctgtccagcggaagtcagatacggttccaggctgacactgcacccttgtgtcttcagccagagaaaaagctgtctttttccttccagatggtattcgctttcaggttcggattccccgggacacagcctgctttttttatgagcgaagtgcggcagtttttcgcgtcccagtttgatatcaagctcacttttgcaaacggggcagaaccagcgtttctttctcagctccgccgctttttcctttgaatagcttccggccagctgaatgagccgtccgccggcagtcactgcactgaacatgttgcatcttctcctttcctgaatcttgttgtattcagcaggaagaaggcataatcctgtttgcggatgagagccgttatacggttttcagccgttcatcctgtcattcagaacaaaaaaaaccgatttctgctgagagaaatcggttttttatgatgcaaagtgtttttttattgtatataacgcatgatcagcgatcactaatttgccgtattcttcaagacggtgaatgctgactgatgattcgtgcgcgtactccaacaggatgcttagctgattttcaacctcttcatcagtttgctcataaaaatctgcatataaataatatcggtcttcaaacgaatacagggtcgttttgattccgttaagattcaattttgatagcgagatgagatcctcaaaatcatcgaaccgcaaagtgaactgaagcttttgctccttatcttcccggctctcggcctgctcttctttctggaaatcatcaagtaaagcatcgagattttcatctgccggctcttgttttttatcttccgggatcggcagttcgagtttttgtccgtccttggaaagctgggcttttgttacgattatttccagtcctttgtccaatgcctgaacctgaatccaaagaggaccctcgacagcgaattcctcttcatcatgcacttcatccatgacttcccagaacagttcttcactgcgctcgcgattgtaccagatttcttctctgtcaaaaccgcgatcttcaatatcaccataagacatataaaattttacagtatgctcattaattctttctatttccattttgccaaccttcccttctttataagatgttgaagggacatctaagctcccgatgaatagtactttactacactttacccattccgtccacatcttaaccttatagaagacagcgcaaattctttatatttctattttatgataaaacagttataaaagaaataaaaaagcattttcacaccgaaaaacaggctttctcccggttcccatcataaatagcgcactgcttcatatattagctgtacaagcaatcgatctataagcgaggtgttaccatgccgcacgattacctgctgtcccttctgcttattatcgggattgaccttattctcggcggtgacaatgccgtcgtcatcgcgatggccagccggaatctggcccataaacaaagacagcaagcgatcatcttcggaacatttatcgcagtcgtcttgagaatcgttctgacgagcgctgcggtctatttattgaatgttccttttttacaatgcgcaggcggggtatttttattgtatctcggctatcagcttctgattgagaagaaagatgcgcagcatgtgaaaagcagttcttctctttggaaagccatccgcacaatcgttctggctgatatctttatgtcgcttgacaatgtcatcgcagtagccggcgcttctcacggtgagctgacactagtagtgatcggtctcttcatctcggtgccgattattatttggggcagcaagctcgttcatgccgccatggaaaaaatgcctttattgatgtatgccgggagcggtcttctcgcatttaccggcggtgaaatgattgccggagacagcaagctgtcatttttcatggcagaacacggcatgatacagatgatgctgccgattttgaccgttgtttttgttatcctcgccagtatgatttaccagcagactgaaaaataacaaaaagcccaaaccgcgatggttttgggctttttccatgcttatcgtaagcttatatcagttggcaagacgctgtgcttctcttaattggaaagaacgcacttttcttggcaggaatcgtctgatttcatcttcgttatagccgacttgcagacgtttttcatcaatgatgatcggacggcggagcagtcccggatgctcattgatcaaagtatataagtcttgaagcggcatagattcaacatttacgttcagtttctggaatactttagaacgggtagagataatttcatccgtaccgtcttcagtcatacgcagaatctgcttgatctcatcaattgataacggctcggagaaaatgtttctttctacaaacggaatctcgtgctcttcaagccaagctcttgcttttctgcatgacgtacagctaggtgatgtgtataatgtaaccattaatcttcactcctctaattagtaggatgaacatgtttgtattctcaaattgaaatgactttaaaaaaggaatctttataggtattatactataaaaaagtaagtgtgaacagtctcctgagaaaaaaatgtgtcaatccggcaaatttacggctggaggatttttccccattctcaattagctcagctgatcgaaaatgtttttttgttttttctcatcaatgactttgagaacttcatccgttttctcgtatgattctccgtaccatttttcatctttataagtgtgaatgttttcatatgtctgtttcatcgcttcaaatatttcttcttctgattccgtcttaggtgaccagtacagaatctccattttgttcacttcattcgtagccaatgaccggcgccgatacccgattgactgcgcgtgcttgaaatgctctctttgataaaaacgcaagcgtttctgtgtatccgtgtcatcctcgtcaacaggctccacctcaagcagaatcggcttgttcttctttttcagtctgccgatcagcttgcttccgaggccttgtcctctggatttctttgacacaaacaggtaatcaataaagatgaaagagtcaaattccgcatacatcagcacgtggtactgcccctcttctttatgataaacatcgctttgctcctttaacagagcttccatatgcgcttttgatttcatttcttcaatcggaaaatattcactcagcttttcgtaccagttcattcatttgctccttatgggttcgttgtcttcacacttttagatataccccatttccgattgtttaaacaatcttacatctattaagacgtgtgatcctttaacatggtttcaatttttttaaaatggtgtgtaatcgacgtttttggtataacggtttgccgcgtcccacaataaaaattcgtcaattccttcatcatgcagcgctttaacctggtcctccacctggcgtttcccgtacttttgataatttccgctgccgagatatgatgccgtgaagtcctgaagccacggacgcgatacaggcgggtgtttcagcttggacagctttttattttccaccttcgcgtattctttgacgacattgtagggctcaagatccggtttatcaatgccgaaatagcttgtccaatggctcggataaatcatggatgaaatgacatcgacctggtctgaaattttgctgaaattctggccgataccaggcgcttccggcagcgtggctgaatagccgaaaatatcaaccgacacatccgcgccgtacggcttgagttttttcttcgcataaccgacaaaatcggtgacggcgtgaacgcgtttttgcacattgctgtctgctgtttttccgtaatcgccgtgtccgtatgtcagttcgtcatcacgtttttcaaacccttcaggaaaacggacataatcaaactgaatttcttgaaaacccatctttacggcttgttttgcaatctttacattgtaatcccatacttctttcataaacggattgacgaacgattcgccgcggccgtttttccagacacttccgtttttttctttaaaggaccactcgggctttttattcgcgagttcgctgtctttaaatacgacaatacgcgcgatcggatagatctttttttcctccagctttttcatcatcttttttgggtctttgatgtacggcttggcgattttggcatactcagaatggccgtccggcttaaaggtgaggttcccgttgtcgtccttgacatcaatcaccattgtattgagctccgttttgtccacaaagtctgtcagctccccgaatttgcttcctcccgctgaatgtcctgtgacgtaaatgccccgcaccttatcaggatgtgaaaaatgcagccctgacggataagcgaaccgtgcatttgatttcggcaattctttttcagccagtgctacttttacaagcggctgctcctctttcacagcggcatgggccggataagcggctgcactgataaacagtcccgcacaaatggcgcacaaaatggttttcatactgatctccccctttttttccattatagaaaaacgggagcaggcttaataaacttgaatgtgcgcaaaaaaatcctccaagactcagtcttggaggatgatacgtttatagataggttttaaattcagcttctgtgcacatgacaaaatgtcccggtttcacttctctgaattccattttttctccttcttggagctgatgaactgccggatcgtatttctttcgcgtgcgatttctttcatagtccggatcaggaagcgggatagcggacagcaatgatttcgtatatgggtgaagcgggttttcgtaaagctcatccgccggcgcaagctccaccaattttccgaaatacatgacgccgatgcggtcgctgatgtatttgaccattgataaatcatgggcgataaacaggtaagtaagccctttttctttctgcaattctttcattaaattgacgacttgcgcctgaatggagacatcaagcgccgaaatcggttcgtccgcgatgataaactccggatcaaccgccagcgctctggcgattccgatacgctggcgctgtccgcctgaaaattcatgcgggtagcggttggcgtgctctttatttaaaccgaccgtttccagcagttcgtgaacccgctgcatccgctcttttttcgtttttgccaggcggtgaatatctattccctcggcaataatgtcggcgactgtcattctcggatttaaagatgcgtacggatcctggaaaatcatctgcattttccggttaaactccagcagcttcttgcgggattttttcccgtggacattttccccgttaaagagaacttccccgccggttgcctcatacagccggataatactgcggcccgtcgttgatttaccgcagcccgattctccgacaaggccgagcgtttcgcctttataaatatcaaatgacaaatcatctacggcttttaccgttcctttctgcgtgaaaaaatgctgttttaagtgtttgatttcgagaagtttctcagtcatttttttcaccttccttcattaaaacaggatgctgatacgtattcggaagctgacggattttagccttcaccgcttcaggcggctcgaccttaggcgcatcaggatgcagaagccacgatttcacaaaatgcgtatcagacactttatacatcggcggttcctgttcaaagtcaattttcatcgcatatgagctgcggagcgcaaatgcatcccctttcggaggattcgtcagatcaggcggcgtacccgggatggccgtcagtttttcctgatcggtgctgtccagactcggcattgaggcaagcagcccccacgtatacggatggcgcggatcataaaagatttcatccaccgtgcccgattcgacgacctgacccgcgtacatgacggcgacccggtcggcgacattggcgacaacgccgagatcatgcgtgataaaaatgatagacgtatcaattttcttttgcagatctttcatcagctcaaggatctgtgcctgaatcgtcacatcaagcgctgttgtcggttcatcggcaattaacagtttcggatttgccgcaagcgccatcgcgatgacgacacgctgtctcataccgcctgaaaattcatgggggaattggccgatccgtttttcgggcatcggaattccgacgagatcaagcagctctatggcgcgctttttcgccgcttcacttgagattttttcatgtttgaaaagcacttccgtaatttgcttgccgactctcatcgtcgggttcagagaggtcatcggatcttggaaaatcattccgatgtcctttcctctgatggcctgcatttctttttcggacatcggcacgatatcgcgtccgtcaaaaagaatctgtcctcttttaaagtagcccggcggcatcggaatcagcttcataatcgcttgggaggtcacactttttccggaacccgactcccccacgatcgccagcgtctctcctttattcaaatggaaattgacgccgcggattgcctgtacctctccgccgtatgttttaaatgaaatggctaagtcttttacttctagcaaacgtgtcactcatatcactccttatttgcgtaacttaggatccagcgcgtctcttaacccgtcgccgacaacgttaaagccgaacatcgccaggcagataaagccggcagggaagaacagacgccaagggtaataggttaatgcaggcaatccgtctgaggccatcgttccccagctcgcaagcggcgcaggtacgccgaggcccaaataacttaaaaacgcttctgtaaaaatcgccgtcggaaccgtcagtgtcatcgttacgagtatagagcccatcgcgttcgggacgatatgcttaaacaaaagccggccggttttggcaccgagtgtctgtgaagcaagcacatactcctgattctttaattgcagcacctgtccgcggacgatcctcgccatattgatccagcccgtgatcgtcatggcgacgataatggtgagcaatcctttcggcaggacaaccatcagcaaaataaccattaataatgaaggaacagcccacagaatgtcggcgatgcgcatcatcacttcatctgtgcgtccgccgcggaatccggaaatgctgccccagattacgccgatcaataaatcaagcacggcagctgcgacaccgataaagatggaaatccgcgcgcccacccatgtccggacgaatatatcccttccaaggtcatccgtgccgaaccaatgatctttcgacggcgctttatccgcatttaatagattggtagtggcataatcataccttgaaaagataggcgcaaaaatcgccatcagaataataagaacgatcagtacgaacccgaccatcgcaagcttattgctgcggaagcggagcatggcgtctttccagagggaaaggctttttttatttattttttcggcatcgccggcattagctgaagctggttcaaacatatttttaggaatgttctgcatggtctaggctcctttctttgctttggaaagcttgattctcggatcgattaatccgtacagcacgtctacaattaatacgcatagaagcaggagcacgctgaagaacacggtaactcccataatgaccgtataatcacggtttgtaatgctgtttacaaaatgcgcgcctaaaccgggaattccgaaaatggattcaatgatgaaacttcccgttaaaatggatgccgccatcggccccatatatgtcacgaccggcaaaagcgcgtttcgcagcgcatggcgcacggtgactgacggacgggacagtcctttagcttttgcagtccgtatgtaatcgctgtttaacacttcaatcatgcttgaacgggagagtctggcaatgaacgccatcggcatggaagcgagcgcaatggagggcagaaaggtgtatgcccaggattcccatcctgcgaccgggaacagttctaatttaattgagaaaatatattgcaaaatcgtcgccaatataaagctcggaactgagatcccaaagatcgttaaaatcgcaatggtataatcctgccatttattatggtacagggcagcaagcaccccgaaaagcacaccgaacgctaaagcgaggagaatagcttctgcaccgagagtgaatgagacggggaagcctgaattgattaaatcattaacactttggcctttatatttaaaagaaggcccgaagtcccacatcgccacagattttaagtagctgacatattgaacgaaaagaggcttgtccaaaccatagtgttcgtttaagtttgcctcaatttcaggcggcagctttctttcgccggaaaatggtccgcccggcgctgcctgcattaagaagaacgtggcggtcacaatcacaaacaatgtgatgatcatgtaaatgaatcgtttaccgatatatttcagcaaggtgaacacctccatgttttttacaattttatacgtaatcagtaagaaaggtatatggggacatcctccccatataccttgggtcttttgttttcagaaccggcttttattcaaaagaagcgtttctgaagtaaacttcgcctgttcctgtcaagatcacatttttgaggtttttatcctgcacccaaggatccgtatagaaataaactggcgcgaccggcattgcgtcgataaagatcttttctgcttttttcagctcttcgatacgtttatccggatccgtttcaagctgagattggttcagcagctttttaaactcaggatcttcccacccggtatcattgtttccgccttctttatcacggaacaattcaaggaagttgatcggatcgttgaaatcgccgagccagcccatacgtccgatttggtagttttggctgtgcagcttgtcgatgtaaacattccattcggagttatcaagttcaactttgacgcccaagttctttttccacatttcctgtacggcctgcgcgattttcgcatgcgcgtcatccgtattgtaggacagcttgatcgccggaaggtcagaggcactcttgacgcctaattccttcagtcctttatttaagaattctttagctgatttgacgtcattgtctttgaagtaaccttttgtgttatccttgaatcccttcattgacggcggcaccgcagccatggccgggatttgttcgccctgcgttacatttttcacgatggacgagcggtcgatcgcataagcaagggctttacggatgttaacattgttcagcggtttcgcttctgtgttgaatttgtaccaatacacgcctgcgatcggttcaacgtgaagagatccgtcttttttcaatgtcggcagagattcagtcggaagctggccgagcggcattcctgcccagtcaagctcaccggcctggaattttttcagttcggtgttgttattgttaatcatcaccatgttgattttcttcaatttcacagcgtctttatcccaatattgatcgttcttttcgagcgtgatggaaccgctgtgtttccaggccgtcattttgaacgggccgtttgacacataattttcgcccgcgtttgtgttccagtttttatgtttttcggcgattttcttgttgatcggcatatacgtatagaatgaagttaattgcgtgaaataaggtgtcgggttattcagttcaacctttaatgttttgtcatttacggcttttacgcctacatcatcaatcttgccttttcctgtattggcagcttcagcgcctttgatgtagtagagctgataagcgtattgtgattcgttgttcgggtcaagcacccatttccatgcatattcaaaatcctgcgccgtcacagggtcgccgttagaccatttcgcaccgtcacgaatcgtaaatgtataggtctttccgtctttgcttgtttcaattttagatgccattccttcttcagggtcacctttggagtttacgcgtgtcaatccttcaaaagtctgtcggattacgcctcctgaaacggaatcattcgctaaacccggatgcaatgagaacggctcggttttaatattgatattaagtgaagtctgtcctttggtgtcttttttgccgccgcctgatccgccgctgaatccgccgcacgcacttaatacaagcgagaagataagcatcaaacctacaatagaccaacgctttttcatgcactaaccccctaatcaaatttttcagcctttactactaaatactcagaaatatcagacaaaataacttaatatttttctaaactttaattgtgttccgtcttttctgattattttatgtaaagaagctgtaacaatagagtgaacaagttcattataatgaaatgaataatttattgcaatactattttctcaatttaaaatatttaaatttggtcagtttttctgtcaaaaaggtgatacacttctatagtttaaagcatgacctaactaaatttttttaatgtaatttccagttcatattgctttttacatataatattcgttatacgaaatgttgatatacgttatcatttaagctttttcagttctttttgaggatttccacccctaaagtaaactggaaataagcttgtattcctctgatgacatttggctataattgatttataatagatcaatcaaatacatttgttgtgattgcgatgatgaagagtagtacacattttcatccgtttgaagagagtctgcggtgctgggagcaggtaacgggcgatgtggaatggacttctgagcagctgaccgaacgttagtaggcccagccggagcagcctccgttaccaacgtctcgagcgattccattgtaatggaataatcagggtggcaccacggttcattcgtcccttttttctacgggaagaatgggctttttttattatgttttaagaaatgaggtaagaactatgaagaaaacgattttttcaggcattcagccgagcggttccgttaccctcggcaactacatcggcgcaatgaagcaatttgttgatttgcagcatgactacaacggctacttctgtattgtcgatcagcatgcgattacagttccgcaggatcggcttgagctgcggaagaacatccgcaatctcgcggctctttatctggccgtcggacttgatcccgagaaagcgaccctctttatccagtcggaagttcccgctcatgcccaggcggggtggatgctccaatgcgtcgcatatatcggcgagcttgagcggatgactcaatttaaggataagtcaaagggcaaagaagccgtcgtgtccggactgttaacctatccgccgctgatggccggcgatattttactgtacggaacggatcttgttccggtcggagaagaccaaaaacagcatcttgaactgacccgcaacctggcggaacgctttaataaaaaatacaatgacatcttcacgattcctgaggtgaaaattcctgaatcaggcgcgcgcatcatgtcactggctgatccgctcaaaaaaatgagcaaatcagatccgaaccaaaaggcattcatcacgctgcttgatgagccgaagcagctcgagaagaaaatcaagagtgccgtgactgattctgaaggcattgtaaagtatgataaagaaaacaaaccgggcgtttctaatcttttgacgatttattctattttaggaaacacatcaattgaagaattagaagctaaatatgaaggcaaagggtacggtgaattcaaaagcgatttagccgaagtcgttatcggcgcattgacaccgatccaagagcgctatcgtgaattaattgagagcgacgagcttgaccgcattctcgacgaaggggcggcgcgcgcaaacaaaacggccggcaaaatggtgaagaaaatggaaaacgccatgggtctcggacggaaaagaagataaaaaaaagaggcgggagaatccccgcctctttttttagttcacttttgattcctgttccatttcccaaagcttttcgaaaaacggctgccctttaatcaaattttcacagaacgcaagatgtttatccgaccagccttcaattgtttcattgtaaagcatgtcccagatctcttcaaaactcatccgtttgatctgctcatacatatgcggattccattccgtgtaccaatacacaatttccgcacggtttttcagccctttcagctggtcgagcgccataaacatcagctgcttgatctgccgctcttttctcgtcagacctctgacatgccccggcgccaatgacaaaatgtgatattcctttgaagactccaattgcgacggctcaaattgaaacgattccggttctacatcctttaccatttcataaacaagctgctcctgtctcggaatcaggcggctctttctgaccggaatggtatacccgatcgtatccacggcaatgatgccgatcccgtctgtcacgacaaaacagtactccagctttgtccgctcatgattttttcgcacgtatgacttctggtggacttggtcaagcagctctttcggaagctctgataagtcgttttctatgtaatgaaataatactgacggcactctgagcagcggcgtctgatccaaaagctcaaccgtgtcttccttccgccattcgtgaaaatggcatacattgtagccgttttcttccccttcaaaccaattgacccatacatcatgaagaaataacatattcgacccctcactttataaaaactgttgtccacagtataggcaagggatagataaattattccatttcaatatgagatttccgttttacggagctggatttccgactgcattgcaacaaaaaaatctcccgttcgtccgggagatcatttcacatttttcggatcaagcgcatcacgcagcccgtctccgacaaagttgaagcacaatacggtaagaaggatcaacaaacccgggaataacgggtaccaccaagcctgtatcataagcgtaaagttctgtgcatcctgaagcatattgccccagcttgcgatcggcggctgaatcccgaaaccgagataacttaatgtagattccgccaaaataaccgttcccacctttaatgtggctgagacgataatcggtccgagcgcattcggcagtatatgagaaaagatgatgtgatggttttttgtaccgatcgtctttgcagctaatacaaactctctggaacgaagcgataaaaactctcctcggacaaggcgtgccgttgttgtccagcctgtaagggagaaaattaaaattaatttatccattccgggctgaaaaatcgtaacaagtgtaattaacaaaaatatatcaggtatggataatacgatatcaacggttctcatgagaacggcatcgacaaaccctttaaaatatccggcaacggctccgacaactgtcccgattgtaatcgcgccgatcacagaagcgaatccgacaagcaaggagacgcgcgccccgtacagaaccctcgtaaagatgtctcttccgaatttatcagttcccattagatgttttaagctcggcggcttcaaacgattgatgagagattgactctccggagagtaaggagcgattaccgaagcgaataaagctgacaagataatgatggttaatataacggctccgattacagctagtttattttgaaagaacttttcgaaaaaaatcttcgtcattgtttccggtttggattgaatattttcctttaatttcacttcgctggggggtgtgccggtatttggctgtaacatttgacctctcacctctctttgttaatattcaatgcggggatcaaccagcgcatataagatgtccgcaattaaattccccactacaaccaaaacagctgaaatgaccgtcatggccatgataaccggataatcccgcgaaaaggctgaatcaataaacaatttgccgagacccggccaagtaaaaatctgttctaccactaccgctcccccgataaatgacggtatcatcaaaccaaaaatagtgatgacaggaagaagcccgtttctcaaaccgtgtttaaaaatcactttattatctcggaatcctttcgcacgcgccgttcgtatataatcctgttttaacacatcaagcatactggatcttgtgtatctcgttatccctgccatgtctgccgtggcgagcacaaaagcaggcagaatcaagtgatgcaatcggtcaaatatgttaaagtcagcattcaaagtgcttactccgccagtgggaaaccaccccagatttacagataaaaccatgattaaaatcaaaccgaaccaaaaattcggaatggcaagccctaaaaatgaagtaacagttatcccgtaatccaattttgaataaggacgtttcgctgacagaacaccaaatggaatagaaatcagaagagcgacaagggttgagaaaagcataagcacaatcgtattcggtaagcgggataagataagttcagaaaccggagtgcctttcttgacgatagaagtcccaaaatccccttgcagcatattccccagccatttcacatattgaacaggttccggatcattcaacccgtatttttcaatgaatttcgccctgtccgcttgactgattgtagggtccatcataagtgacatcgggtctcccggcgctgctttcatgatggcaaacgacaaaattgtaatgcctaagagaatcggcaaggacattaatgttcgccgtaaaatatatgtaaccatattcttgtcccctttttaaataggataagagaggaaaggaacctccttccctctccagggcttttgctatttttgatccagccaccatttttcaatattgtacaagtcatttttagggtggaatacatagccttgtaaattattcggcatcgctctgtggtaattgtaatagaataagaagctgtacggctgatcttcagcaattaatttgtatatctcttcatacttcttttggtattcttttctgtctgtaattgacttcgcttcttcaagcagcttatcgactttcgggtttttataccagatattattcagcccgtttttcgattggcttgaatggaagatagagaattgatccgggaacgttgcaagactccatccgagaagaagagcgtcataatcccaattaggggcacttgtctgttcgattaacgcactgaattcaacaattcgcggtttagcctcgattcccacttcttttaattgctgctgaacgacaacagctaaatcttcacgaattttattgccttgattcgttttaatttcaaatgagaatttttttccgtctttatcaaggtagccgtcaccgtcatggtcttcccatccggcttcttttagcagctgctttgcttttttcggattataatcaaatgtcggcactttagacttcggataattccatgacagcggactctcaggaacatccgctaccttaccgtctccgttcagcacttgatccaccattgcctgcctgtcaagagcgtaagtcaatgcctgacgcacttttttgtccttaaaaagctcttttttctcattccagccgatatagctgtagtttaagccgagatcagatttgaccttcacgtttccaaacgttttaaccgtatcaaaatctgtgcccggcacaacgaagaaatcaatatctcccgcttttaactgggccacggccgcgttagaatcaggaattgttttgactgtcactgtatcaaggtaaggtctgccgccaaagtaatcatcatttgcttccagtttgacatactcaccttttttccactcaacaaacttaaacggaccggagccgattggatttttacggttaaattcattctctcccagatctgcaaccggcaccttacccaatatatgttttggcaaaatgccgtaactgtcgagaacgacattatagaaataggcatcttttttcttcattttaaactgaatttcatattttccttttttcgttacggatttaagggactcaaaacccgagccacgctcaccgttgtaatccttgttaagagggatgctgtaggtgaaaacaacatcatcggccgtcagctcttttccatcatggaatttaacgccttttttcagttttacatcatacgttaatcccccgtcagcttctgttactttttcagccagcgacggcttgacgtttaatttctcatccgtttccaataatgtgctgtaaatcatgccttcaatatcagaacttgcaacatcggtagaataaagtggattaaaaagtgtgggttccccggttgacccgacaaccaaatctccgcctttttgcggttttcctgccggtttggattcggtgcttgtggattttgagccggagcaggctgacaggaagatggcgagcgccataaaaacacttagcatcatcagtgcgcttttacgtaatttcatatcaattccccctttgtgatatatatgcagcaaactggttatgtaatccggcataccccctctcgatgcttgtcatttcaggcatataaatggcaggcgacgtaatggccgggagcggcttcttcaaatgccgggatttgttccttgcagatcggtttggccatcgggcaccgcgtgtggaacacgcagcctttcggcgggtttgccgggcttggcagttctcctttcaggatgattcgttcccgcttgacggcgtctttttttctcgtgacgggcactgaagacaaaagcgcttgcgtataagggtgaagcggattgccgtacagctcgtgtttatcggtcagctccatcatttttcccagatacatgacgccgactctgtcgctgatatggcggacaacactcaaatcatgagaaataaacaaataggtcaggttgaattcatcctgcagttcttccatcagattgatgacttgggcctgaatggagacatcgagtgcggaaacgggttcatccgcaataatcagctcgggattcaacgtcagagcccgcgcaatcccgatccgctggcgctgccccccggaaaattcgtgcggatagcggtttgcaaagctcgggtgaaggccgactttcgccagcagctcctccactcgctcgttccgctcgctcatgctgtacatatggtgagtctggaacggctctttaataatggaacgcagcgttttcctcgggttaagggatgcgaagggatcttggaataccatctggatgtttttgcggacgctttttctcagcttttcttcagataagccggagatatcttgccccttaaagagaatccggccgtctgtcggcttgtataaacggatcatcgtccttcccgccgttgatttgccgcatcctgattcaccgacgatgccgagcgtctccccgcgcttcagtgaaaaagaaacgccgtcaacagcctttatatcaccgactttcctttgaaaaaaaccggagcggatcgggaaatatttttttacgtctttcagctctaaaatcgtttcttggcctgcagctgtcattttgattgggcaccctcttcctcatataaaaaacatcttacagaacggccgctttcatgcgttatcagctccggctgccctgttttgcatttgtccatcgcttttgaacacctcggggcgaatcggcagccttccggaagattatccggtgtcgggacactgcctttgatcgcttttaatgtatcaatctctccatctatcaccggtatggagtttaacagcccttcggtatacggatgaagagggtttaaaaataagtcctccacacccgcactctctacgacttgtccgcaatacataacgatcaccctgtcggcggcttcggaaaccacacctaaatcgtgagtgatcagcagaatagaagtatcgaattttttgcagaggtctttcatcagctccaatacttgggcttgtatcgtcacatcaagcgccgtcgtcggctcatcagcgatcagaagcttcggattgcagctgagcgcaatggcgatcatcaccctctgtctcatccctccggaaagacggtgcggatattctttcatcacttgttccgctctggagaatccgacgagttccagaagctcaacggcttttttagccgcttcttttttattcatttttttatggtattcaagcacttcggtaatttgttcgccgatggtcagcaccggattcagggaagtcatgggctcctgaaagatcatagagacgtcatttccgcggattttgcaatattcgttttcggtgaaggaggccaggtccctgccttccagcttaatcgagccgtccataatttttccgcccgagctttggacaagtcccataatagaaagcgaggtgatgcttttgcccgagccggattctcctacaagagcgacggtttcgcctttgttaatgtgaaaatcaaccccgtcgactgcagggatcggctgtttctttctgaaaaaataggtctttaaattattcacttctaatagtgtgctcatgatacgcccctttctcattccgctgaagcagagggaaacatacgtttcgctatcacaaaatatagaatagtcgaaaaattttatagttgtatattattacatcattattacaaaagcaagaattttttaggataaatgtaatatccttaaataatttccattcttttaatctattaaagcgttgcttccagaaaggtttttgaagggatggccaatgcttcttttactgttttttgatggtcggttaaatatttttttactatattgaatccgacggcatagccaagcattgaggggaagtatccttttccgtataacagctgggaaaacattctgctgtctctcgttaagcggaggttcggcttgactcttttttcaaacaaaaaatcaagctgctcaggcgtatagtaggacgtccattccgccgtaagacttgagccgaaccgctcatatacagcatattctgccagcccctccatcatgattgtatcaagaaatgtctcatctttttcgtcctttgtcacatgttctaaccggcagacgtgattatattcatgtgtcataagggcggatacagctgaattggaactatccgacgatagaaagaggaacattttgtcccgaaaggccagaccggattttgatccgaattcctgacggattttccggtttcgttcatcaacgggcaaaactacgatcggcacgtccggcccgttccacttctcctttaaataggcttcctctttttgtatatggctgtagcatcctttttctttcagccgtttactggtcctaacgccgtccttcagatggcggaacatgccgtggttttgcagcatcccgagtatcggcttccactctttcttatcggcccctgaaaaaagcggcaaaagatgcggggccaggtcatttacggatgccgccttttccatccattgatatgtctgcttgacgctcataccggttcgcctcctcttgttgttatcatatgcacgcacaaaaaaaccggccacctttttcaggcagccggtcaaaaactgtattattgatattttttaaagatcaaagtggcattatgtccgccgaagccgagcgagttgctgagaacgatgttgacatcctgctcgcgcgctttatccggtacataatctaaatcacactcttcatcaggtgtttcgatgttaatcgtcggcgggataatgccgtctttaattgccatgacggagaagattgcttcaattcctccggcagcgcctaacaaatgacccgtcattgattttgtcgaactgacggcaagcttgtacgcatgatcaccgaaaacggtcttaatggcttttgtctcgtatttatcattgtagtacgtgcttgtgccgtgagcgttgatgtaatcaatttcttcaggcttgatgcccgcatctttgattgcttcctgcatcgctctcgcaccgccttccccgtcttgggcaggcgcggtaatgtggtaggcgtcacccgttgagccgtagccgacaatttccccgtagattttcgcaccgcgggcaagggcatgctcaagctcttcaagcacgacgatccccgcgccttctcccatgacaaagccgtcacggtttttatcaaacgggcggcttgccgttttcggatcaggatttgtagaaagggctttgtttgcgctgaagcccgcaaatgacattcttgtcagcggcgcttccgttccgcccgtaatcatcgcatcggcatcgccgcgctgaatgactttaaacgcgtcaccgatagagttcgttcccgtcgcacatgccgtcaccgtacaggagttgactccttttgctccgagagcgattgagatttggcctgtcgccatatccggaatcatcatcggaacaaagaacgggctgacccttctcggcccttttgtcaggaagatttcgaattgggattcaagcgtttcaagaccgccgattccggacccgacccaaacgccgactctcggagcgatctcgtctgtgatgttcagaccggcatcttgaacggccattttcgcggctacgacagcgtattgcgtgaagcggtccatttttcgcgcttcttttttatccatgtgattttcaatattgaaatctttcaattcagcagctactttcgccggatactcgtccgattccacacgtgtgatcggtccgattccggatacgccgccgattgcatttttccagcttgtttcggcgtcgttgccaagcggagacaaggctccaagccctgtaacgactactctttttttactcatcttgtgtgcacctcacctttttttatcgtccccagcgtaatgctatggcgccccatgtcaatcctccgccgaaaccgaccatgacgatgacgtcgccgtctttaattttgcctgcttccagttcctctactaatgaaatcggaatggatgctgcggatgtgtttccatatttatggactgttttagacatcttttcaaccggaagctccaaacgttcccgtgccgcttccatgatgcggatgtttgcctgatgcggaatcaaaaagtctacgtcctctttggagaggccggctttttcaataacatttacactcgattcacccatttgccggacggcgaatttgaatacttctcttccatgcatgattgtatgccctttttcatctaagtacaagtgctgaccgcctgtaccgtctgctccgagctcaaatgaaagtatgcctctgtcgtcgctgaccggtccgatgaccgccgctccggctccgtctccgaacagcacagccgtattacggtcgtcccagtcggtaatgcttgagagcttttccacgccgaccacgaggacatgtttgtatgtttgcgattcaatgaattgtttggcggttacaataccgtacataaaacccgcacatgcggcgctgatatccatcgcgcacgcttttttggccccgagcttctcttgtatcatacaggaaacggtcgggaaagactggtcaggagtaaccgtcgccacaaggatcatatcaagctcctcagcggaaatgccggcctgatcaagcgctttttgcgcagcctcagcggccatgccggatgaatacatatcttcagcggcgattcttctttcttctatacctgttctcgtacgaatccactcgtccgatgtatctaccatttgttcaagatcatgatttgtcagcactttttccgggatgtaacggccgacgccaagaattccagctttcattggaaaagactccttttttataatgaatttaaaactaattagttatgatcaattattagtatcaggtactaattctaccctattttttttctgttggcaatatattcgtctaaactatcggacgctgctcctcatagaataaaaggaagacgaaaggaggcttcactatggatattttctccaaaatgatgttcggcgattccagagaccgggataaagaaccggaagaaaacccggagcagcctcaggctgaaaacgaagaagagatcgattacaaccacgtgttgaatcagctggggtccatcatgaactccctggatcaattaaagcccgtatttaaagactttgcgccgatggtgtccgccataaagaaaaaaatcatgtgaaaagccacttcatgaaaaagtggctctctttatttattcagctccccggcatcagatctgccaagctcatacgcttccgccatgaccgatgtaaacaggtccataaacggctgaatcatttccatagacagatctatgccggatttctcaagctccgcctttgcttccggcaagtatttcatcgcgatctgcataaattcaagagacttttcatgctgcatgtgtatccacctctattcatttgacggcagttcatttgtttgattatacgttttgacaaggtctgagattttgtcttgaaacgctttgtccaccagcgggctgaacgtccccatttcaacgactccttccctgaaatcaaagtcgtgatctccgctcttgagcgtacctttattatattgctcggcaattaatgtataggctttatctacgttttgcaccgtgcttgtcagcaccgtgtttttgccgagattcgattgctcggcgacatagccgatggcgtaaagcccgtcttttttgatttgctgaatgacaggaacattatacccgtctccggccggatatacaacatccgtgccctccgcttttaacttctcgtaaagatgcagcgcttcattgccgttatcccagtggtccgtaaattcagtattgacggtgatatcaggcttttcatatttcgcccctttgataaagccgtctacttcaggctgccacaaaaaggaggcgatgacaccgacctcattggtttttgacatatgggcggccgtcattcccccgaaaaaacccattgcttctcccataaggtgaacgcttgtgacattatcgcttttcgccgttccgtttgcgacgacgaattccatgtcgggataatccttgctgatcatattgaagatttcctcgtattcatttccgtgcccgtataaaagattgactccttttttatgaaaatcatctatcgcttttaaaatatcttcatcggatctgatattttctttataataaacgtcaacgttaaattcagattgtatcgctaataaacctttgtaaccttttgtgccccataccaagtcactgatggtatcggggaaaagcattccgaccttctcaatttttcctttaaacggagtttgtgtgcatccgctcaataaaaggaggacagaaaagatcatgacaagcctggtgatcaagccatgttcaaccccttttcaaactcataacatgtataattgatatacgtttattgtagcggtaatgcacataacatggaaggtatttcttaaaaaatgtcgaatattgatgaaaattgtcttttccattctttaattttttcttccgcttccgttttttgcgttttttcttttatttccagggtaataatctgattttcgtcttctgtgccgtcagcctcaagcttattcatcagcccccagaccgcgtcttctaaaaagatcctgctttctccatcttcttttgcttccgtccacggaccgtaaaggggaggaaggataatcgcttttgccgtatcccgctgaccgtttttttcccagtctccgtgatcctcactgtaaacaatccaatataaaggctcagcccttttttcaggcagacacccgctcccgtattgaacgcagatacgatcgtattccttttcaccgatttcctctattatttgaaaaagcccgtttctcgcgagccacattaaacgttcttctaaatacagctgcctcgttttgtcctccggttctgccaaaatgacatcaacgtgcacaccttcatccatcaaccgttcgcacaatgaaaggccgagaaattcatctgctccaatgatcagcgctgttttcatcacatctgccgcctttccggtttttcatacacacacaagccaaacagccctctgaaaagagatggctgttgtattctattcattacaggtctttttcatgactgcggaaaaaccggcagatggctctgtacatacgagcagggttctcaagcaggtgatacgtgatatcaatcttgcttccggtcttttcccgggcttctttatacgcgttcgcgtgcagggtgtacgggtacggcgctccggtcgttctttgccatatatgtaccggcacgcgggtgcggcagccggtaatggtctgatagctcagtgagcttgcctctttttcagaaacaccgaagctttgtgccgtttccctcagaaactgcttataaaaaaacttattttctttctctgattcaaaatgggcttgaaggtccagacaaggatctaacattgcggctgaacggatatgctccggtgaagactgcagcaattgatcggcgatgagggcgcccatgccttctgcgagcaagtgtattttcggattgagggtttcttgtttcagcacataatgaatcagctgtctggcgtaaagggcggctttttccgaaccccaatgccgtccgtataaattgctgttgaaaatggtgtaccctctgtcaagcagcgtatttaacagctggtttctcccttcatgttcgagccaaaagcttgagtcccggctgacaaagtgagttctgtcccccagaataaagatacagaagccgttcggccgatacggcagatggatgacgttcagctcagatccgaattggaaaaatctttccgttatccccatgcctgcccgcctccttttactcctaatctctctattggctatcatatgtaagaagaatgaaaacggatcggataaactcctatttgctgctatgttttggctattatcccaagcacaggaaccgaattttccgtcagacggcaagacaggcgggcacatgtcagtttcaggcgcgctttttgatgagaaaatgaccttccgcccgcgctttatgtatggtatgatacaacgtagaataaaatgaaggacgaggtggaaacgtgcggtttattatcggttttatttggacgttccttttaacacatatggcctgttatttggtcgcctccatgaacagcgcggcgtacaatttcaagcaatcatccgttattgccgtggttattgcggtgctagtctttgttcttgcggagatcatgcctgtcaaacaggatgcaaaccagcattaaataaaaaacctgctattcagcaggtttttttgtgttcacggttttcgttggtacgtccacaatctgttgtggtttgaagtttcagggaacatttctcccaccgtaagtttgattttttgcggatttttgaccatgcttcccgtttcgccgatttcaacgtacacaccgttattcggcgctttttgtcccgggcggaattgatgctgctgtcccacgtcatttcctcctttttcttttttatgtagtatgcgcttgtatgcggagaaatatcaaaaaccgctgaatgagattcagcggtttttttgttcatcctgtttgtatagaagagctttcaggagcgctttttgcgcgtgaagccggttttccgcctgctggaataccgcagagttcgtgccgtcgataatctcggacgtgacctcttcttcccgatgcgccggcaggcaatgcaaaaatgtatagtcgggtttggcgagactgacgagtgaggcgttgacttgatacggagcaaacacattcagccgctgctgcgtctcttcctcctgccccatgctcgtgaagacgtcggagtaaatcacgtctgcatcccgcaccgcttcctgcggattttcggtaagggtgattttcgctccggaaacagccgctgcttctttcgcggcattcaccgcctcttcctctgcttcatagcctttcggcgaagcaaccgcaatgtcacagcccatttttgcgcagccgatcataagtgaatgcgcgacattatttccgtcaccgatataggcgacttttactccttttaattttccttttatttcttgtattgttaacagatccgcgagtgcctgacacgggtgataccggtcggtcagcccgtttatgacgggaatatcagcatgctcggcaagctcttcgactttttcatgctcaaaggtgcggatcataatggcatcaacgaagccggacagcaccttggccgtatccgcgaccgtctccccccgcccaagctgcaggtcgctgcttgaaagaaatagtcccgttcccccgagctgggccattcccgcttcaaaagacacacgtgtgcgggttgaagatttttcaaaaatcatcgccaatgttttcccttggaaaatcggctgtatcggatgttgttttaataatgaagcttctgtcagaagcgcattgatgtctgacgggctgacatcttttaatgaaagaaaatctttgccgtacaaatgggttaatgtgtgttccgcttttattgtgtgcatgatgccacttccttttgataaagatctttgagcgatacaggctgaggtttgccggagccgcttgctaaaaatgcctttacggtttccggttcagtaaagaccgtcacaccgtgcgtcatggcttcgatccgttgtttacgcgcttcttcagagtgattgaaattaatatggaccgctttatcctttcgctctgcccatgccgggaacgcatctttgcatacggtaaatcccgcctcttgagcctgacgttccaattccgcatcacagccttccagatagatgctgccttttttctcccagacgtgcgcgtagatttttttcagtgcgctttctgcgtcaaacgcgacacacatgccttctccggtcgacttcatttccggcccgggctttacgtccacatcctgaatggcgtgagaagaaaaaaccgggaatttcactgccgttccgtgctgattttgaacctcgggcttgatgtctttaagggaagcgccggccagcaatctggcggcaagcgggatcatcggcacccccatcaccttagacacgacaggaaccgtgcggcttgcccggggattcacttcaagaacgagaatatcccctttgtcatcaatgacaaactgaatgttcataatgcctttaaaagccagttttaccgcgattttttcggcggcctcttttatattccgctgcatatcaggtgtgacagacggacccggaagaatcgcaaaactgtcgcccgaatggacgccggcccgttcaatgtgctctgtgtaagtcggcacgaatacttcatgtccgtcggaaatcagatcgatctccaattcttttcctgtaatgtactgatcgatcaaaatcgggtacggcatgcccgcttctttttccaggagctctgacatttgcgcttctgaatgaacgatgatcatgcccatccccccgatgacataagacggacggatcagcacggggtagccgattcggcttgctttttcagttgcttcttcttttgaataagccgtttcgcctttggcatgtttgaggtcaagatcatcaagcagctgataaaacagatcccgatcctccagcgcatcaagggtttcaaaggatgttccgagcagcggaatgcccgctttttccagcggttcagcggcattgatcgcggtctgtcccccaaactggacgatggcaaaatcaatgttttcatgttccgccacgtttaaaatatgttctgtcgtcagcggttcaaaataaagccggtcggcgatttcataatccgtgcttactgtttccggattgttattgatcataatcgtttcatatcccagcttttgcagggtcagaacgccgtggacggcgctgtaatcaaattccactccctgaccgatgcggatcgggcctgagccgatgatgagagcgcgttttttctcttttcggctgacatctccgtcgctttccccaaggtaggtggagtagaaataattcgtcttggcatcaaattcagcggcgcatgtatctacgattttaaacgacgggacgatgcctgatttctttctgagagcacggatgtcttcttccgtttttcccgtgagagatgcgatcatgacatccgtgaagccttttaccttcgcctgctttaaaagcgggacagacagatgatccccttcttccatcagcttgttttctaatgtgatgatatttcggaatacatggagaaaaaacgggtcaattttcgttttggcatggatatcttctatcgtttcaccgcggcttaacagttccatgacgacgaaaaatctccggtcatccggcgttaccgctaattcccacagctgattgatcgtacagccgccgagttcaggcaggcgggtgccgatcgttttcagctcaagggaggccgccgctttttgaatggccgcttccatatttctttcgatcgccatgacctctcccgtcgctttcatcttcgttccgagcgtgcggtcggcatgtttaaatttatcaaacggccagcgcgggaatttgacgatgacataatcaagcgccggttcaaagcttgcataagtagagcccgtcagcggatttttcagttcgtcgagcgtatagccgacggcaagtttcgccgccattttggcaatcgggtagccggtcgcttttgacgcgagggccgatgaacggctgacacgcgggttcacttcaatgacatagtactgtttgctgaacggatccagcgcaaattgaatgttgcagccgccgaccacatccagcgccgaaataatcgccaggcttgcggaacgcagcatctgatattcttcatccgttaacgtctgggacggtgcgacgacgatagagtctcctgtatgcacgccgacgggatcgatgttttccatattgcagacggtgatgcatgtatgattgctgtcgcgcatgacctcatattcgatttctttaaatccggcgatgcttttttcgacgaggcattggctgatcgggcttgctaacagcgcctgtttaataagcgtctgaaacgattctttcgttttcgcgattccgcctccctttccgcctaatgtgtacgccggtctcagaataaccggaaatccgatagactcagcgaagcggagggcgtcttcttcgttgtcgacgatttcgctttccggaacgggctggtcgagctctttcatcagggcgcggaactgctcccggtcttcgcctttttgaatggtttccaccgatgttcctaagagcttgacgtgatgcttcttcagcacgcctgcttcttcaagtttaacggctaaattcaatgccgtctggccgcccaaattggcaagcagaccgtcgggcttttctttttcaataatggcctcgatgctgtcggttgtgagcggttcaaaatatatttcatcggcaaacgcctcatccgtcataatcgttgccgggttgttattgactagaataacgcggtatccttcttctttcagagccatgcagccctgcgttcctgaataatcaaattcagccgcctggccgatgatgatggggccggagccgatgactaatatgctggaaatggttgtatctttaggcatgagcgatttctctccttgctggtatcactttctctagaaattcatcaaatatccactcgctctcagccggaccgggatgagcttcagggtggaactggacgcttaatacgggaaggcgcttatgaatgagcccttccactgatgtatcattgacatggtgaaatctgatggacagctcgttttcgtcaattgacgcttcatcgacgacatagctgtggttctggcttgtcataaacacccttttcgttttccggtcaatgacgggatggttggcacccctgtggccgaacggcagcttatacgtatttcctccgaaagccagggcaatcagctgatgcccgaggcaaatgccgagtgcagggaaatcactgagtaaagatgtaatccggttcatgtacggcgcaatcgctttcgggtcgcccgggccgtttgagagcacgattccgtcaggctgaatgtcataaacggcatccatctgctgatacggaatgaccgttactttacagccgcgctttacaagtgacgaggcgattgattttttataaccgaaatcaatcagcgcaatatgccggtctccgttccccattgaagtgatgtcttcagactgcgccagctccgccggattttgtgttccggatgctgcgggaatttctcctgctgttgacacagcagcgttcatcgtgccgccggagcggatggctttgacgacggcccgtgtgtccacttcggttaagagcgggatgttccatttatttaaatactctctcaagcttgagactgcttcatggtgagaaaaatgttcacacgcttcatagacggcaacagccttgacttgtggaattttactttcaaggtctttttcattaattccgtagtttccgatcagcggatacgtaaagacgatgatctgccccttatatgacgggtctgtaagcacttcctgatagcccgtcattccggtgaaaaaaacagcttcgccaacacagcaagcctctttttcaagttcaccgccgaatgatgttccgtcttccaatactaaatagcctttcatctaaagcccacctcttgatgaataattaattaaaaatatgaatttttatacctttatatcgaaaaaaattaccgtttcactgccgaatgcgcttcgatcgctgctttcagcatactgacggccgacagcatttcttcttcagaaaccgtaagcggcggaagcagcctgatgacattcggtccggccggaagcacgagaagcccgcgttcctgcagatctccgatgatgccggacacgggacctgcgcattcaatgccgattaataacccttttccgcggatttcttttacaaaaggccctgtcagttcacggttcagctgcgcttttaaaaaagagcctttgtctgccgccgcctggagaaagtccggctgaaacacaatgtccaaagttgctttcacagctgccatggcgagcttattaccgccgaaagtcgtaccatgcgtacccggcgtaaaggcgtcggcaagcttctttttgccgatcacggctccgacgggaaaaccgtttccaagccctttcgcagcagtgatgatgtccggagagatgccgaagtgctcatagccgaatgccttgcccgtccggccgattccggtttgaatctcgtctgcgataagcagcgcctgtttgtctttgcaaaatgtctgtaaggcttcgatgaattccggatcggcgggattgactcccccttctccctgcaccgtctcaagcatgacggcggcgatatcatcctcttttgaaagtgtgctgaatgccgacgggtcattaaacggaagatagtgaaagccttggagcatcggtccgaaaccggtcttgattttgtcttgtccggtggcggccatccccgcataggtccgtccgtgaaaggattgatgaaatgttacgatttttgtctttcccgttgctttacgggcaagcttaatggcgccttcattcgcttcggctccgctgttgcagaagaaaacgagatcccccgcgctatgtccggcaagctttgccgcggctttttcctgaagatcattttcaaacagattggaaacgtgccatacgctgccaagctgttctttcaccgcttccgtcaccgcatcatgacaatggccgagattggaaacggcgatgccctgaataaaatcgagatacgtttttccgttttcatcctctgcgattgtccctttcgcttttttaatatcgataggccagcggctgtaggtttgaaataggctgctcatgacacgctctccttttctttaacgatttttgttccttggaagacttgattggtgaaaaacgctccttttccgtttacgatcatcacttcctcgacatcttcactcagtgccgataatgccgagtttaccttcggaatcatcccccctgaaattacgccgtcatcgatgagggcctgaatttcttgcggcgtcaaagtatccagcctgttctctccgtccataattccttcgacatccgtgacaaataaaagtttatcggcgtgtaaggctgaagcgacggccgatgccgcggcgtctgcgttgacgttcagcgtttcgaaatcacttgtcatggaaagcggagcgataacgggaatgatgccttctttcattaatgcgtggatgattgacggatcggttttttgtatttcgccgacttctccgtatttgtcttgattaaggtaagacgcttgaaggagaccgccgtcctttcctgatattcccgcggctttcagcccgtttttcgcgagttcggttacgaaaaatttattgatcgtccctgacaagaccatttccgctgtttccagcaccggtttggtcgttttccgctgtccatcgacaaattccgtttcaatctgcaatgttttcagcattcttgaaatgtccgggcctcctccatgcacgacggcaaggttccagcccgattgcataagctcttttacattttgaaaaaaatcggcggataactcgcggattacactgccgccgcacttaaaaacgatggttttcttcatgccgctcccctttgctatgtgcgatagctcgcattgattttgatataatcataggttaagtcacagccccatgcccggccgctgccggagccttcctgcaggcggactgcaatcgtaatttcatcacctgataagtactccttggcatcagtttccgaaaacggctgaggttcgttgtgtttaaacagacactgaccgccgaggaaaacttccacttgttcggccgttacgcttgccgcactgtgcccgatggcgccgatgatgcgcccccagttggcgtctgtgccgtaaacggcggtcttcacaaggcttgagccgacgatttttttggcgataatattcgcctcaaggttatttttcgcgccttcgactctggcttcaattaatttcgtcgctccttcaccgtctctggcaatatctttggcaaggtcttcgcatacaagctttaacccctttttaaatgccggccagtcagggtgctgctccgtcaggcaatcattccccgcgcagccgttcgccatcacaagcaccatgtcattcgtcgatgtttctccgtcaacggtgatttggttaaatgaaacatccgtaatctctctgagcgcatttttgagcgactgttcttccacggccgcgtccgttgtgacaaagccgagcattgtcgccatgttggggtggatcatgccggagcctttcgccgctccgccgatcgtgatgatgtttccgccgatcaccagttcataacacgtctgtttcgtcactgtatccgtcgtcaaaatggcttcttcaaatgctccggacactgacggcgcttgaccgagctgttcaatgcccgcctgaatttttttcatgtctaaaagctcgccgatcaccccggttgacgaaaccgcaacaagctccggctcaatgccgagctggctcgcgaagccgtcccgcatttcataggcgtcctttaatccttggtctcccgtacaggcgttggcaatcgcgctgttgacgataaccgcctgaagcacggcctctttttttaagctctcttgcgtcactttcaagggcgctgcctgaaaatggctttgcgtatataccgccgcactgactgcaggcgcttcgctgataatcgctccgagatctttttttgaatagcgcagaccgcagtgcacgccctttgcctcaaaccctttcggcgaagatacgccgccttttactttcgtgatttcctcactcagctgaatcatattttcgaatccctctttcgttctatggatagactggcgtcatcgtaagtcccgtttcttcctgccagccattcatgatatttaaattttgaaccgcctgccctgcggcgcctttcatcagattatctatgacagaaacgatggtggcacggtttgttctttcatccacggtgacactgatatcacaaaaattgctgccgtatacctctttcgtcgccggaaattcaccttccggcctgattctgacaaaatatgaatctttgtagaattcggaatacaattctcttacctgtgcagcagacataccagggggagcctccgtatatatcgtcgccataatgccccttgtcatcggcgccaaatgtgcggaaaacgtgatcggacctgtgccgggctgccaagccgctaattgctgttcaatttccggagtatgctgatgctcattaaccttataaattttaaaattatcattcagctcagaataatgagtgcccatggatgcttttcggccggcaccggatacgcctgttttcgcatcaacaatcagaaaagaatcttgtaaaagcttattcttcgccagcggggcgagcccgagcagcacagccgtcggaaaacatcccggattggcaatcagcttagcagtctgaatctcttctttttgcagttcggctaaaccgtaaaccgcgctttgaatcgttcctttcggcgcggccttccgcttataccacttttcatacacggccgggttttgaatccgcagatcgccggatagatcaatgaccgggatgcccgcctccgccagcttgggcgaccactctccggaaacgccgggcggcgcggctataaacatgacatcaatttcgtttcgaatcgtttctatatgaagcggctgaagtgattgtgacgctatattcctcaaatgcggatatgaagcggcatattcttttccttcgtcgctcgatgaatataatatacaatcttctgcataagggtgatggttaagaatcctgacaagttcggcgcctccataaccagtcgcgcctataatacctattttcaacgggttcaccttcttggtttttgtgaaattatttaacattataacatgaataaaaattaattcaattgtatatttaatattttttcattcattttccatcggttttcgctgacaaaaaccccctctcgatcgagggggtttcataagaaaaacaggctgatcggatcagcctgtttttttcagcatcatcagcccgcttataaaaaacagcacggagctggcgtaaaaaataatataaaccgtgaagaaatcagcgagaaacccgccgagaataatggcggcagctgaaaatacggccgtccagaaatgatagctgccgacttttttcccccgctccccgccgtcagtgtaatcggcgatcatgattttctcgccgtgtttttgcatggcgccgaacaggcccaaaagcacctgcaccacataaacctggtgcacgccggtaatgtgcgggagcgtcagaagaagcaccgccatcccccacgaattcgccatcaggaaccagcggggatccagtcttgccgacagccggccgagcagcggatgaatcaatgcgccgctcaggccgaacaagccgtatgatagaccgaattgagtgtagctggaaccgatgtttttaataaataaaatataaaacggaaagatcaggctgccggcaaaaaagacactgctctgagacaggatcagccattttaaatggttgtgtttcatgatttgtacctctgataaaaataattcataaacaagtcatcgggatcatatttgtgttttttctgaaagaacatatcgcttttcggatatgcctcgcgcatctgctctttcgtttgatacagcatatacggcagataatagctgccgcggtggcgcaacgccgtatccgtcatttttctgacaatccgcgctgcactcgcctggctgtcttttgaaaacccttcattgattaaaagaacgagtgaaaacatgtcttcctttgcgtatgacagatcggctttttcatttttttgcacgtagcggatcgtaatatttacgagattgagatcttcatgtgacagcgtcttgcgtaaatcatgaatgtacggtgcaaattcgccgacgggcacgaagtattcttgaagcacgtcggtgttgtccgtgttttcatattccaaaaatttcgattctgaccgcatgacattgttcctggagactttcacgccgttttgactgagaaaataagactgctgggttgaccagaaccaatttcttccccagtcataccggcgggagaggccgagcgcgaatttcgtcagcgccggatgctcatcttctttcagttcattgtgccgctttaattctttctggttgtctgagagtgtgtaatcagtcacatacatatcgtgcaaaaagcctttatcccctgttgcgatccgcgcgagatgcatgcgcacggcggggttgcgctgaacatgctgcgtaaaatattgactgtatgtatcagcgttcatgcgtttcgttttcatttcataaagctcatcatccgtcagctcaatatccgcgtcaaggatgacgccgaacaggccgtagccgccgatgacggctgaaaacaggtcatctttcggagtaacggtgatgactttgccgtccgcctttaaaagatgaaacgatttgaccgtatcaatcagcgaaccgtaccggatatcccggccgtgggcgttggcgctcagtgagcccccgatcgtaaaaatgttttgcgattgcatgacttttaccgcgagcccgtacggattgacatagcgctgaatatcattccacgtcgctcccgcctgcactctgatgatttttttctttcggtcgagaccgagtattttgttgtagcccgtcatgtcgagaacgatgccgtcttcataatacgtctggccgcccattgagtgctgggcgcctgcgattgagatcttcaaatgctttctctttgcttccttaatcgtttcgaccaatgtttctttctcttttcctttgaccgtctgcttaattttcacgggcatgagacggcttacatccgtcattgtccctgcctgccgctccggctctttgtgaaaggcggaaacagcgaacagcgccgtataaacaagaatgctaaggataatgagaagtaattttttcttcatgggttcctccctcgcatgcagccggtctattatatcatgcctccgtccgtttttttcctttttaacccgataccgcaaaaaaccccgaatggcgggaaacttgttttttttagtgacttgcccttctttccgcacgccggtctgcagcgacaaagcagacgcgtccggcagaatcatgtttagtacagttcaaaacggtcatccggaaaacaccaggcataaaaaatacacagaaatccctaaaaatgattttttagtcagtatataatcgatatatatgcagatgtattaccaaagggattgtttaaaacaaagatgttaaatgaggtggggaaaatgaacataaaagggatcaatcatcttcttttttctgtttcagatttggaaaaatctatagaattttatgagaaagtatttcatgcacaacttctggttaaagggcaaaaaacagcatattttgatctgaacgggctttggcttgcacttaacttagaggcggatataccaagaaatgaaatacataaatcctatacgcatacggcctttacaattgacccaaaagattttgatgcaatacttcaaaggttaaaaaatctaaatgtaaatatattaaatgggcgtcctagggataagcaagatcaaaagtcaatttattttactgatcccgatggacataaatttgaattccgcacaggtacactccaagacagactgtcctattacaaaaaagataaacctcatatgaaattttatatataaaggtttgtttgcaatccaaaacaagccctcactgtcgcttatatgcagacaaaagaaaagcacctccaaactttaggatgtacctaaaatccggggtgcattttcttattactgaatccctaatgcgatttttgcgtagcgtgacattttgtctcttgtccacggcggattccagacgatgtggacctccgtctcttttacatccggaatgtcggcgagcgcttttttcacctcgtcgacgatgatcggagcgagcgggcaccccattgatgtcagtgtcatcgtaacgtgcgtcaggccgtcgtcatccatatcaacgtcgtatacaaggccgagattgacgatatcgacgccgagctcagggtcaacaacctgctccaaggcgcccatgatgttttcttttaatgcttcttccacgttccatcactcctttttcctcagtataacgcaaaagcggcttttgttaacacctttgtgctttataaatgcttatcgaaccaggcgacggtttctaaaacggcgtatctcgggactttatgatcagcccgttcgtctttcagaaactgaagatggtcgggccggctgctgtaatgaggtttaatcgtttcataaaagccgcgggtcggtgcatacggaacgactttgtcttgaacgccgtgccagaacagcagcgggcggctgcggagtttttccggttccagactgagatcgaacggtttgagccgcgcaaacagttcatcgacctgttcttttgtgacgtcaatgtcgatgtccttcttttgaatgtggtcaatctgctgctgaaaaaatgccgtatagttcggacttcccatcagactgacgccggctttgacccaatcatacgcagccatcgcgccgaatgtcgtaattccgcccattgacgtccccgcaagaccgatccgcccgtcttcaatcagaccgcgcccttcaaaatcctttttcagcacgtcaagctcctcgatttcatttaagacaatgtcccaaaaatggacggcgagctcttctgctgacagctgttcagcgcgttcaccgtggtaaagagcttccggcagcacggctctgaaacccttttcagcaagcaggtaagcgaaatgaagattatgctccttcgcgcttgtaaaaccgtgaataaagaaaacaaggggagcgggacggtcccgattttcttcttttacaatatgtaaaaacggaatgcctgatacggtttgatgatcaataagaatcacgttgactccctccttaggataaccataatcataagtgtaacatgtagacaataaagatggtaaaaagctacactgtacataagagaaaaacagcaaattatatgacaaaaggagttatttatggagacaaaaccttacctcatcgccttagatctggatggaaccttattaaaagatgataaaaccatttcccctgaaacggcacggacgattcagacgctgaaagaagcgggccatcatgtctgcatctcaaccggccgccctttccgttccagttcgatgtattatgacgagcttgggctgacaacgccgattgtcaattttaacggagcgtttgtccaccacccgaaagacgagtcatggggacgataccacacgtctttatctgtcgatgtggtcagacagcttgccgaacttacagagacctaccaaatacataatgtgctcgctgagatcattgatgatgtgtacttccattatcatgatgagcatttaattgaggcgtttcatatgaatacggcgaatgtcacattcggcgatctgcgcgaaacggtccaagaggatgtgacgtccgtattgattcacgcgaaggaagaggacgtcgcggacatacgcgcgcatttatccgatgtgcacgccgaggtcattgaccacagaagatgggcggctccttggcatgtgattgaaattattaaacacgggatgaataaagcggtcggcctgaagaaaatcagcgactattaccaagtgccgagagaacggatcatcgcgttcggcgacgaagacaacgatcttgaaatgctccgatttgccgggtgcggcgtagcgatgggaaacggcacggatgaagtcaaacaggccgccgatcgcgtcacgggttcaaatgaagcggacggaatcgccgaatttttaaaatcctatttctccctgtgaggttttcccgctcataacacaaagccttccgcccatactaaaacagacgactcatctcgtctaaatatggaagggggacattgcaatgggtaaacgaaacaaatcaaaacggtttattcagcaaggcaaggactctgtcagtcttcatgacgcaagatttccatatcggtctacattagaggaagcacagcatgatgcagcaaaagattcggctgaaaggcaggttgacttttaatgagaaacgaactgttttctcaagccaagtcatttgtccagcaggccgtcatgattgctaacggtttcgaggacggcgaccaggaaaaagctgtctcacgcgccaaaaatgccgtgtcttccgcgtacgccaattcgacggatgcagaacgtcagcagctgcaccaatttcaggatcagctggagaaattgcaataaaaaaaggcgccccgtttagatgagggcgccgcttttttatattacttcaaatgtttttaccgttttcagtctttttccgatctgatcggacttccctaaaaacgtcaccgtcaccgtgtatgttcccggaccgggcacgttcttccacacatctgaaaagtcatacgtttcattcggcattaaggtcacggtctgaaacgcctgggtaaacattttgtcttttgaatagcggtacagttctttgtgatgttggtcatgtacggtcagttcgaatttctgccctgagctgaatgtgaaatcgatcgggctttcgcttttgttttttaaagacatttgaaattcgatctgctgatctgtctgcacaggatttacggctaattccgcttgctgttcattcatctctccggatacctcctcagcgggctccttctgcccggattgactgctgcatccgatcaataaaatgaccggtaataacaggccaaacagccacttcattctatccgctcctatcagtcttttctgaagaaaccaaagatccccgtcgtttgcacgatgtttgtgaaggctttcgggtcgacttctttcacgattttctcaaggtcatacaattcgtaccgcgtgatgacgatgatcatcatttctttctgttcgtttgtgtaagcgccttttgccggcaccgtcgtaatgcctcggaccattttcccgtaaatcgcttctttgatttcatcagctttttttgtaacgatcatggcggtcagtttcatgtggcgcgtgtgaatggcgtcaatcacccttgttgtgacatacagagcgacaagggtatataatgctttctcccatccttgcaataatcctgccgtcaaaatgataatcccgttcaaaatgaagaaatatgtgccgaccggtttatccttccatttggccagcaccatcgacacgatatcaagaccgcctgtcgaagcgccgaatttcagcgttaaaccgatgccgatagctgagatgactcctccgaatacggtattcagaagaatatcgtgtgacagtctcatttccgggagaatccccataaagacggacgtcagcgctacgcttaatatgctgtatacggtgaatgatctgccgactttcagccaccctaacacaccgatgggaatgtttaagaggaacatgagaactcctgtcgaaatataaaagggggcgtattgatcaacgacgcttgacagcagctgggcgacaccggtaaaaccgctggaatatacatttgccggtatcaggaataaattcagtcccgccgcatacagaaacgcgccgatgacgacgattgctaatttttttacttgttctagtaccatggcttgctcctccgctcattttcattattagcttttcccttaaaataaagttttgaacactattttgccaaatttatatgatatagttggcatcactctcaccaaccggaaagaagggaattatgatgacagttcaccttattgctgacagcgcctctgacctgccgaaatcttatattgaagaaaaccggatcgggttcattccgctgcacgtaacacttgacggaaacgaatatgaggacgcggtcaccattcaggcggatcatatctttcaagcgatgcgggaagggaaagttccgaaaacatcccaggcatcaccggatacgataaaaaaagtatttttacaatacgcggaactgggagaaccggcgatatacatcgccttttcctcaggtctttccggcacctatcagacggccgtaatgatcgccaatgaagtaaaagaggaatttcccgattttgatttacggattgtagattccaaatgcgcttcattgggctgcggcctcgcggtgatgcacgcgcaaacactctgtgttaacgggaatacaatacaagaaatcgaaacgtctgtaaagaacttttgcgcacggatgaaacatatatttacggtcgatgacgtcgcctatctcgcacggggcggcagaatttcaaaaacgtccgcttttgtcggggggcttttgaacatcaaaccgattctgcatgtggatgacggcaggctcgtgccgctcgaaaaattgcgcggacagaagaaactgtttaaacggattatagaaatgatgaaggaagaaggcggcgattgggcggatcaaaccgtgggaatcagctatgcagataatgaagagacggcgattgggatgaaggaaatgattgaagaagcgttccatccgaaagaaatcattcttcattcaatcggctctgcgatcggcgcccactccgggccgggcacgctcgcgatttttttcctgaagccataatttcaatgcgggcgggcatcctaacggacagaagggaggctttgccgcatgaaagatgatgacaaaaaaccgttggacaataacgccgtaaaccagaaaaagaaccggcttgccgaaaaaaaccggcaggcgggaaaaaaccagaattccaaaaaaccggaccatctgtaaaagcaaaacagccctcttgtcttaggagaaagagggctgttttttgcgcacggatgtctgttacaaagtaaaccggcggacctgatcgtttaaccgctctgtcaggctcaccagattattgacgctttccgccattttatgaaaagaagacagctgctcaagcgcggaggcagaaatctcttcgcttcctgcagccgtttcctgaacgacggcgctgatgctttcggcatgatgcagcacttgctcaccaagctgtttcgattcgatgatccgtccgtccaattgagtaagctccgccttaatatgggcggctttttgttcaatatgggcgaatgattctgacgttttctccatcagctcctgctgtctgtccgctaaagcgacgccggtcgtgacagctccggtaatagatgtgatgccgtcttcaatttgctttaccatatcgaaaatctgcgcggtcgctttggctgatccgtctgcgagcttccgtatctcctcggcaacgacggcaaatccttttccggcctcgcctgctctggccgcctcgattgcggcgtttaaggacagcagattggtctggcccgcaatgtcggaaacggtctgcgccatcatactgatgcctgccgcatgcttagcggctttgtccgcatcgtccgtcatcgtttttttgagcgccgccagtttatccgagctgcttttcatatagctttgtacatcttctttctgggcgtctgcgagcgtataggaatagccggtgatgctttcttttaacgtattaaggtcggcttttgcttcctggacgtttaacagcgcgtccacttcatcttcatttgaagcctgaatcttcatcatgtttacgatggtaaagccgatgacggcggcgaagcaaatcatcgtaacggctgcgttaacgagcagccttgtccgtaatgtcacttcagatcgcctcctttttcaatcagactgtttttcatatccgtgatctttttcgtcagcccgcctgcgtttttgacaactctgatcttggctaagtccatgccgttttccttcagtccgtaaacgatctcaccgcttttgatctccttgttgtcttttaaatctttcgccaattcatagatgacatggtcgacgtttttcactaaagaagagataacggcgtgctcggcggtgtaatattgatcgctgtcaacaccgatggcgtatacttttcgcgcctccgcttctttcagtgcgccgacacccgtgaagccggccgccgtaaacaggacatcggcttttcttcggatcatgttttgggcgatgcgcttcccgagcttatcatcatcaaacgtaccgctgatttccgacagcacgcggatgttcggtttgactgattccgcgcctttcaggtagcctttcttaaaccgtttaatgacgtcggcatctgaaccgccgataaatccgatcgtgccggttttgctcgtcatagccgcgagcgctccggctaagaagcctccttcatcctctttaaacgtgacggaggtgacattatccaggtctgatacagaatcaatcagcacaaaccgctgcttcggatattttttggcgaccttttctaaatccgcctgcatgctgtaaccgagccccacaacaagatcattgccttcccggacaagctgggtcagtcctttttcgtacgtaccggtgtcttttatttctctgtaatcaaatgtgatgccgagctcgtctcttgctttcatcaaaccttgaaagcctgaatcattaaatgattggtcgccgaggccgttgtctgtcagcatgatgccgattgttttcgttttttcagccgccgccccctcggatttgccggcacatcccgccgtgctgagcgcaagcagcagtacagccgcaaatatcgccatttttctcattgaaactctccttttgtttttttctatagttatatatcggttcggatgtcagaatattttatttcaataaaatatgtatgttcggcaggttgataaacaaatgagggcataggagcttttgagaaaataaaaaacaccggttttggttcaccgatgtttttgcagaaaatttattgtttttcgtatgtccagccgtctttctgatacactttgccgtttttcatcaggtgcccgagcgcccgcttaaaggcggctttgcttaaatgaaaccgttcgcggatatcgtcaggatcgcttttgtctccgtaaggcatcgcgccgtttcttgatctcagataggtcagaatctcctccgcgtcaaccgaaagcgcatcctgctttctcggcagcagggacatgttgacggagccgtcttccttcacctcgatgacacgccccgtcacgcggctgccgagtctcggctcttcttttctttctgaagggtgaataaacgcgcggatgccttcatcggtaatcagaaaagagcctgatgcgatcagtctgtacaccgtgcctgtcaggtctttattcatgacgtcttcctctgcatccgtaaataattcactgatgatatcctcaggcgccggcttggcaaacatgcgtccgcggcttgtcaccttcagcatgcaatacagtctgtcgcctttttgcggccagacggatttgtacggaggcaggtgctccgttgcgacgagcgcgtcttttgacagaccgacgtcgacgaatacgcccatatcctccacagcgtccgtcacttccacccatccgtagtcataaaagctgatgagcggctttttcatcgtcgccgcgagtctttcctgatgatcgacgtaaataaatacgtccacttcatctctgtcttcaatatcctctgtaatttcactgttatgtaaaagaaccgtatcctcgccgtcggttaaaaaataaccgaaatcggtttggtgatctatactaagcgtgagctgctgccctggtctcatgttatcgtccttcctgattcgcccgtatggggctgatgtttttctcattttttccaatatgcataaattcatgctttatgcagttggacatttctctttattctactataatcaactcataagtgaaatgttataggaggttttctcatggcaaaagaaagttcttttgatattgtatccaaagttgaatttcccgaagtgcagaatgcgattcagatgacgctgaaagaaatcggcacgcgctatgactttaaaggatctaaaagcgatgtaactttagaaaaggaagaacttgtcctgatttctgatgacgagtttaaactgaatcagctcaaagatgtgctgagcggcaagctgatcaaacgggacgtgccgacaaaaaacattgaatacggcaaaatcgaaaatgcctcagggggcacggtgcgccagcgcgcgaagcttgtacagggcattgataaagacagcgccaaaaaaatcaacgcggtgattaaaaactccggcttgaaggtaaagtcgcagattcaggacgaccaagtgcgcgtcaccggaaaaaataaagatgatctgcagcagattattgcagccgtccgcggggcagacctgccgattgacgttcaatttattaattttagataaattatgtgattcctattgattattgtctctattttcggtaaatttggagaaagggattttcacagttaagttttggaaacccatgacaattacatgaacgttcttatcaagagaagccgagggactggcccgacgacgcttcagcaaccggtgtaatggtttaacccaaaccatgaccaaggtgctaaatccagcaagctaaaaacagcttggaagataagaagagagacaaatgattacagagtcttcttcttaagaagactttttttatttctcttttttccttgctgaatgtgacgaaggaggcaaacaatgggactattacaagacttaaaagaacggattttaatcggagacggcgcgatgggcactctcctctattcctacggcattgacagatgttttgaggaactgaacgtatcaaagcccgaggaaatcaagcggatacataaggcttacgtggaagccggggcagacatcatccagacaaatacgtacggcgcgaattttattaagctctcaagatacggacttgaggatgaaacgaaaaaaatcaatcaggaggcggtcagaatcgcgcgcgcttcctcagacggcgcttatgtattgggaacgatgggcggcatccgcacatttaacaaaaacgcctacagcctggaggagattaaacgcagctttcgggagcagctttatttattgcttcacgaagagccggacggtctgctcctggaaacatactatgatttagaagaggcgcgcgaagtgctgaagatagcgagaaaagaaacggaacttccgattatgctgaatgtatccatgcacgaacagggcgtgctgcaggacggaacgccgcttcgggaagccctcaggtcaattgccgatctcggcgctgacataacgggaatcaattgccggctcggcccgtaccacatgattgaagcgctcaccgaagtgccgatattccgtgacacttatttatcggtctatccgaacagcagcctcccgtctttagaagaaggccggcttgtttatgatacggacgatgcctatttccgggagagcgccgtacagttccgcactcagggcgcgcgcattatcggcggctgctgcggtacgacgccaaaccatatcagagccatggctgaagcggtccgcggactttcccccgtcactgataaagaagtgaaaatcagacgggaagaagaagtcatctccgtccggaatgaacggaccgagccgggtttaaacgaaatcgccgctcaaaaacggtcaattatcgtagagcttgatccgccgaaaaaattgaattttgacaaatttctgcaagcggcggctgaattaaaagaaaccggcatagaagcgctgacgctcgccgacaattcattggcgacaccgcggatcagcaatgccgcctgcggttcattgctgaaagaacgccttgatatccgttctctcgttcacattacatgcagagaccgcaacatcatcggccttcagtcacatttaatggggctggatacgctcgggcttaccgacattttagccatcacgggcgatccttcaaaaatcggcgactttccgggggctacctccgtctatgatttaacgtcctttgacttgatcaggctgattaaacaattcaacgaaggcatttctttatcagggaaaccgctcggcaagaaaacgaacttttccgtagccggagcatttaatccgaatgtccgccatcttgataaagcggtaaaacggctggagaaaaaaatcgagtgcggagctgactacttcgtgtcccagcctgtctactcggagcagcagctcattgacattcatcatgaaacgaaacatctcaaaacaccggtgtatatcggaattatgccgttaacgagcagccgcaacgcagagtttattcatcatgaaatcccgggcattaagctgtcagacagcatccgggaaaaaatggcgctcgccggcgaagacaagcaaaagcagaaagccgaaggcctcgccatcgccaagtcgcttctcgacacggcgtgcgaactgtttaacggaatttatttaatcaccccgtttctccgttctgatttgacatcagaacttgcagcttatattaagcaaaaggatgaaaagcgggctgatgtatatttgcattgacgcggaagatgccgcctgatacgacaggcggctttttcatggtacgatacagaaaaagaatcaagcaaaggaggattttttcatggttgaagtaaaacccatcaccgcagaagacacatacgcgatcagacacagcgtgctgcgcccccatcagacgattgaggattgtaaatatgatcaggacagcgtcaaaggagcatttcatctcggaggtttttacgacgggacattgatcagcatcgcttctttctacccgcagaaccagcaggctttacaggcggcgcccgcctaccagctgcgcggcatggcaacgcttgaagaataccggacgcaaaaagcgggaagcacgttaatcgcctatgcggaacgaaaactggcagatatgggggcggcgcttgtctggtgcaacgccagatgtcacgtgaagggatattacgaaaagctcggctggaaaagcacgggcagcccctttgacatacccggcatcggcccgcatgtgatcatgtataaagaactcgcctgaaacaggcaaaagcccgtggcatctcttataagggctttgttttgttatctttcggcgtgccggatgacgttcaaacggaatgaagcttttataagcgccgctattgacgcgatcccgctttgatattaacctttgttcagtaaacaacacgcaattcggcaagggtgggcaggggcgaaaacgatatctgccaattgccgatttcagctattatgtttagaaaagggagtatgagatgaatacgatccaaaaaccgaaaatcccgaaagaattgccggtgctttctttcactgaagcgcttcaggatgaggagctcaaagaagtcatcattgaaaacggcatcgtaaacggcaaactggacggcctgcgcgccgaaaaagtcattttcagaaacaccgtttttacggatgtctctttcagacatatggaatgtacggatgtcctgtttgacaaatgcgatgtctcaaacgctgatttcagcggaagcatcatccatagaacggcgtttcagcattcaaaacttctcggcttgaatctggcggattccgccatgcgtcatgtacggtttgaagactgcctcgcaaattacagctccttcagctattccaatatgaagcatgtccgttttgactcgtgcggcctttcagaaagtgagtggaatgatgctgttcttgaatacacagatcttgacgtctgtgatttgaacggcgcaaacttcatcggcacgtctctttttaatatggatatcagcacgtgcacatttgatcatctgcacgtctcgcttgataagctgaaaggatgccgcatctctccgtctcatgccgttacattcgcagaagcgctcggcgccatcgtgacgtgattttttattaaacgaaaccgcggatacaggcggccggctccccggcatcctgaatcaatgctcggcattggtgatgtggggtgctgctttttattttgcggcgcttttgtttcgataaaaggaattcggccaggtcatgttgaatgtaccggaaggaagagggggaattggaatgtcagacattttaaagctgtatcactaccatagatgggccaatgagcaagttattcagcatctgaagaccctgcccgcggcaagcttacagcaggaactggatagtgtttttccgactttgaacgccgtgcttgtgcatatatgccgggctgattacacttggcttcacgtgctttacagagaaacttacgaacaaatcgtctcgcagtttgatcaatttgaaaagcttgacggagattttgaggcgattgaacatagaatgactgaactggacaaagaatacagcgaatttttaagagaatcggagaacatggaaggcccgatctccatttctcatccgcgcatgggaacgcttcggacgacatatgccgatgtgatccggcatattgtgaatcacggcacataccatcgcggcaatataagcgcgatgcttcaccaaatgggctataaaggcgtgccgactgactacatttttttctcatatgaattataaaaaagcaaaggcatgccgggcctttgcttttttacttcgaatctatcataatccggcatagccgggggcgcccggggtaagctttacaggccttccggttttaaaagattccgtcgcggcgatcccgatttttaagttaatcgcggcatcgatgtctgtcacaatcggcgtttccccttttttcacacattcggcaaagtgctcaagctccagacggtaagcgtctttaaagcgggcttgaaaatccggaataatttcgtagctgctgcctgactccgttaaaatggtgacatggcttttccgcagcgtgccgactaaaatgcttccctccgtcccgataatttccgcgcggatgtcatggccgtacggagaatttcggcttgcctccacatcgccggccgcgcccgaatcaaactcaagatatgttaatgcctgatcgacatcgccgcactcctccatgaacgggtgctttaaaatcctcccgtgcccgctgacagacgtaacctcggcattcatgagatatctcgcgatgtcgtaatcatgaatcgagcagtcaatgaaaagccctccgctatgtttgataaattccgcgggcggtgcgccttgatctcttgtaaatcctttataataaatgggtctgccgatttccccggcgtcgattcttcttttcgcgtcggcgtatgccggatcaaaccgcctcataaaaccgacctggcagatgacgtccgtttcttcgatttttttcatgacttttatcgattcctcaagactcagggtgagcggcttttcaacaaagatgtgcttgccgttttcagccgccttcatgatcatttccgcatgtgtgcttgtcggcgtgacaatgatgacggcgtcaatcgtgagatcttccagcagttcatacggattctccgtccatttggcgattcctaattctttcgcacacgcttccgccttccccttcatcgggtcacagacggccgcaagctcggctccccgcacttcgccggctaaatgcttcgcatgaaaataccctaatcgtcctaatcccagcaccgcacacctgacttgatctgtcatctatcaccgctccttttttcttgaggccgcatgccgtaatggcgcaagcggtttctcttattaaacagaaatcattattttgaaagcgctttatttacaactcaagctgtttgctttctttgcttgcaatccgcagtatttgcgcaagcgctttctcaaaagctgttttaattttacaatgcttttcgctcgtttgacaatgtttttcacagaaaaaaacgcgccttatcgctgagggcgcgtttttaccggtgccgtagaatgcctgatgacgagttccggagataaaatgattttgctttttgtttttttcttcccttgaatctcatcaatgagaagttcaacgacacgccgccccatttcgcggatcggctgagaaatcgtcgtgagcggcggtgccgtcatttcagcgagaatggtattgtcaaagccgatgacggacaagtcttccggcacccgaatgccccgggagcgcgccgcctgtatcgccgcacatgacaagacatcattaaaggcgaaaacggcggtcggaaggtctctgtcaaacagctcgcccgctgcctgttttccgctttccagcgaatattccgtcggtatgatcagcgattcatctagtgtcatccccgcttcccgcagcgctttttgaaaacctttgattctgtctctttcacccgtggtcgaaccgtttccgacgatacaggcgattctttcatggcctaaagatatgagatgctcagccgccgtatagccgccgagaaagtcatcgataatgacgacgtccatcggcgcgagcggtttatcctgcgtaatcatcgcaagcgggatgcccgatttcacaatatcatcaagcgccgtgacgctgtcatcatgatcaagtcccgtcgcgaatataatgccgtccgcctgcttctgccgcagcatcgaaaaatacttcgtttctttttcaggctgataatcggtgctgcagataatgatatgaaacccaagtacaccggcgctgtcttcaatgcttttcgccagttccccgaaaaacgggtttgaaatgtccggggtgatcaggccgatcatattcgtctttttgcccgtcaaagcggatgcgtgaacattcggatgatagtccatctcctccatgacacggagcaccatccggcgggttttgtcactgatcctccccgtattgttgatgacccgcgagacggtcgagatggagacgcccgctttttcggccacgtcgtaaattgtcattttcatgcttaccgatccctcttctgttctctggtattaggtcagtccgttttccggcttacgaatttgcggtattcaagcggcgaaatgccttcaatctgtttaaacagtttggaaaaataggttgggtcctccatgccgatggcgtccgcgatcgcccccattttgtcattggttgcggacaaaagacgtttcgcctccgtcattctgactttgttcgtatactggccgggcgtgacgccgagcacctgctgcatgcagcgggtcacgtagtcttggttgtaatgaagtgccgaagagagcgctttgatggttgttttctcctgatagtgctcctgcaggtaccgggcggcctcccatgcgactctttcctttgcggacgggatttggaacgcttctttctgaagatggagcagcagctcttcaaacagaatctgctttctgagcggcaggtcggagttctcggcgctttcatctgtcagcacactgaattgcccggccataaactgcgggcgtctcaccttccctttttgcggcagggacaagcggtagcgggacggctcttcaaagctccctttttttcgcctcagctccgaccagttgttcccggtggtttccgtcacctcataatccgctccttcaaaatgaagccacgaataggatgtcgtttcttcactgccttttgttccgtaatgttcaagcccgggagaaagcagaatatattctcccgcttcaacggaaaaggcgttttcgtcttctgtaatgtagaggacgccttctttcacatacagcagatcaaacaccgggaagacccgtctcacatgggtttcgccttttttgaacactccttctcccgcagcgataaagaccgggaacggagggactgtgaactcgagaaaggacatatttccggccctcctttttaagtcggatttttgcaagaagtttcgtttctctccctttttattataagaaaatggaggtacacttttaaacgttgattttttcaggaaaggggttaaaagaaatgaaacaagcgattttaaaacgggctgcattcaaacaatcctctgatcacaaactctcattatacgcgctgacttggccgatatttattgaggtttcattatatatgtttatgggaaacgccgacactcttatgcttagccaatactctgacaacagtgtggcggccgtgggtgtcagcaatcagattttaaatttaattatcgtgatgttcagctttatcgcaacgggtacgacaattgtgatttcacagtttttaggatctaaacagaaaaaagaggcgcaggaagtggcttatgtatcaataggagcgaactttgtcatcagtctcgccatcagcgccgccatattttttgcggccgttccgctgcttcatgtgatgggtctttccaatgaattgatgccggatgccaaagtctttttgcaggtggtcggcgggctgtccttcattcaggctttgattatgacgttcagcgccattttaaaaagctacggtcatacgaaggatacgatgttcgttacgatcgggatgaatattttaaatattggcggaaactttcttgtcattttcgggccgctcggccttccggtgttaggcgtcgccggtgttgcgatgtcaacgtcctttgcgcggatcatcgggctcatcgcgatgattgtgatcgtcaaaaaacgcatcggactcggtctgacatggcaaaagatttttcacgtccataaagagcacttgcggaaactcctgaaaatcgggattccgtctgccggcgaacagctgtcttataacatttcacaaatggttgtcacttattttatcgccattatgggcgctcaggcgcttacaacaaaggtttatacacaaaacatcaccatgtttatcctgctgttcggaacggcgatcagccagggcacacagattttgatcggcagatatatcggcgccaaacggtttgacgacgcttatgaccgctgcatgaaaagtctgtactgggcgcttggcattgccgctttgacatccgtgatcatgaccttgttttcaaagcagctgatcggaattttcacaagcagccctgacattattgcgacggcgagcatgctgatcgccatgacgatcattcttgagcccggccgttcatttaatgtcattatcatcaactcgctgcgggctgccggagatgcaaaattccccgtctacatggcgatgatttccatgtggggtatcggactgcctctcgcttatctgttcggcatccatttcggattggggcttatgggcatctggatttcatttatcgcggatgaatgggtcagaggcattcttatgtacagaagatggcggtcgcggatttggattcaaaaagggattgcataaacgccccgagcttcgttaagaagccgggcgtttttttatgcctgcgaaagccgttttctcatgtcaccgagctctgaccggtaatgtgccagcaaaccggtaacggcgggtcttgagtataacggaaacagctccagctcttcagacgcctcctcgaaatacgcctcggcctcgaatgcgatgtactcccatacattcataaaagctttgttgacggtatggctctccagctcttcttccgtatagccgaattgcatcatcacctggcgcgggagacgctttttcgaccactcatccgtatggaccctcagaagcacccgggtcagctgaatggctgctcctaatgaaacggctgcatggcggagtttctcttggttccggcgcgcgcaaaccggcagcagaagcaggccgagggctccgcctgtttggcccgcgtacatcagcaggtcatcaaactcttgatacgttactttttctctgtcagagatgtggccggcgataaactcacgcaacggctcttcttcaagtgcaaattgctgccgcacatcagtgagcgcctcccacaaaaagccgtcggcgcgtgccccgttcagaaagtcttgtgccgcctgttcaaatcccccaagttcctgcatatcaagccgatcagcttcgtgaaacaaagcaagcaccgcccatgcggcccgcctgttttttggcggcagggatgagaaagtccgtttatataaaggaaagtgcacctcggcaagatgggcgcatgtttcgtattcggtcatggtatcactcctctgttttttagtgtaccatatgtttcacaataaaaagaccgatatccttcagcggaaaccggtcgcggcactgttattcttctatatcgatacggtacgcctcaaaccatgtatggatctgggcaagatgggcgatcagctgcgggcctttcatcagctggccgaaccacggcacctgaaaagatgaaccttctgtctccagcagcatttccagcttctttctgtcaagcagggtgtgaagcacggaatctttctgttgtaaaatcgttttcagccattctgtgaccccctgcgtgtatttcgggtgatgcgttttcggataagggctttttttgcggtacaaaatatcttcaggaagcagtccttcaagcgctttccgcaaaatgcctttttcccggctgccatgcattttcatttcccaaggaatattccaaacgtattccacaagtctgtggtcggcgaacggcacccgtacttcaagacttgcgcccatgctcatgcggtctttgcggtcgagcagattggtcataaaccaaagcatatttaagtagaacagctgccgtctcgctttatctgttcccgtctcaccgtctaacagcggcgtttccgcaatggtttcttcatatctcgcattcacgtattctctaagattcagccgtttttgccacttttcatccaagagcgtgaccctctcctcagtcgacctcatccaaggaaatccgtcttcttctgccgcggtgtgaaaccacggatatccgccgaaaatttcgtccgcgcattctccggaaaggctcacgacaaaatcttttttaatttcccggcagaaccataatagcgatgaatcaacatcagccatgcccggcaggtctctgacgagaacggattcctccagatgttcaaccagctgatcctgcgtaatcacgcacttatgatgctgtgtgccgaatgcatttgtcattttatcgatccacgggccgtcatcattcggctgaaaggcgctcgctttaaaaaatttgctgttctcctcataatcaattgaataagtatgaaggggatctcttccttgtttctcaaaatgagcggcggctatcgcggttatcgcgctcgaatcaagcccccctgataaaaacgtgcaaaccggcacgtcagatacgagctggcgtgtcactgcatcctgaaataagtaccgaatgtgagcggcggtttcatcgaagctgtctgtatgcttttcgctctttacattccaataacgccatatggacaaaccgtcctttgagaaagtgaacgcatgggcgggacgcacctcgtgaattcctttaaacaccccgcagcccggagttctggacggcccgagtccgaatacttccgcaagtccgccgctgtctgtgcgggctttcacatcaggatgagcaagaatggctttcaattccgacccaaacagaaaggaagagccgtgttctttataaaaaaacggcttgacgccgagccggtctcttgccccgaagagccgctttcgcttttcatcccagatggcaaaagcgaaaataccgttcaagcggtccacgcactcctcccgccactcaatatagctgtgcagcagcacttctgtatcagaggtcctctcaaaacggtggcccctcgcctgaagctccttccgcaattcctccgtgttatacagctcgccattataaatgatggtgtacgtttcctcttgatgcgtgcaggccatcggctggcggccgccttcaatgtcaacgaccgaaagtcttttatgtccgaataaaacatggggctctccccagacgtttgaatcatcaggccctcgttttgaaagagtgtctatcatattgttcataatatgtttctcttggacgagctgcttttgaaaatcgacccaacccgcaattccacacatgtgatatcagctccaatcccgtttctgtcggtttcaaattcgtttctatcagcactttacccagtttatgcaaagaaacgcagatagttgatttgtcccactaagagttgtatgagacaagcccgatttggaaagaacggaagagaagaaacaaacaaaggagacgggcacggttatgaaacgaaaacagcttttctcagaaaaaaacaaatgggggcgcggcacactgatgatagaggacggcatctgcctcgtcgaaaacgatgaaggcgatatcctgcttgcagacagtctcggaaacgcagacgtattgatgaaacgcgacggcagatggcagccggcacggatttgcggcggttcggccgaaatcggcgcagacaccatccccctgctcggcggggaagaaatccgttatgaaaaggcggtcaaacggccgctgttaaccttgctcgattcgctggacgatgaaacgtttctgctgtttctcagccatctgcacgggttcggcctgtctgtatatgattgcgtattttcctataatcaggcgctgttttccggtgaaggcgtttcgttttatcacttctcggcggatgacgcacaatgcgccctgcagcatcaccgcggcagctcgggtaaacacgacagatttgaatggacggcatctgacgggcggcgctccattatgtattcagcggcaagacaagacggcaccgcgtaacaaacaggcggcaccttttaaataggtgccgcctgatgtattcagctttgtttttcacgctgattgacggccggcgtttgcttttacccttcacagccgtagcttttgcggcaacaagagtgattgacgcttttggcatcctggacatctctttcgcctcatcaacacggcatttctcattcagcggcccagttgcgcaactaaaaaaaacccggatgcatccgggtttttcaagcgattgattaaaatacgtgaaaaccgatcggcaagtgaaggcccagcagcaccgtcaggacgagcacgataataaaaccgatccacagtccgccggttgatttgccttttttcttgcggatgacgagcatttccatcagtccgatggtaatgatgccgagcagcatttttcctgcgtactctccgttccaattcgcaaaacggacaaaaagctcagctccggtcagaataataataatgtagaataagcgcagaatcatatgcgtaatttttgcgcccttcgcttttccggcaccgtacagcccgtagctgacaaacaccaggataagcgcaacgacccatgaagtaatatgccaatgtgtcattatgttcaattccccctatcagatcaatctgcctcatttatggtaccacaacaagccgctcggagcattatcaatcgtgcgaaagacacacaattatccgatttggttcgacagcgtgccgatcggttcaattgtaatgtcaatgcggtcccccggctttaaaaatttcggcggcttaaacccttttccgacaccggacggcgttcccgtcgctataatgtcaccggcttcaagcgtcatcccttttgacagcgtctcaattaattcagctatcggaaaaatcatgtcacccgttgatcctgattggcgcagttctccgttcacccgcgtttcaactttcaggctttgcggatcactgacggccgacttatgtacaatgaccgggcccatcggacatgtcgtatcgaggcttttgccgataaaaaactgtttatgttttttctgcagatcgcgcgctgtgatatcatttacaattgtatagccgaatatatgatcaagcgcatgttctttggagatgtgcgatccgctttttgatatgattaccgcaagctccccttcataatcaagctgctccgttacatccaagtggctgttcactgtttctccgtggcctgtaacggcagccggggctttcgtaaaaaccatgggatgctccggtatatccgcctcactccccatttcaacggcatgatcacgataatttttcccgatgcagatcacgttctttgaaggtctcggaataggcgcgcaaagctttacgtcagacagcgcatacataaatgaacccgactcgtcattcggttttttcgcccattccgcaagctgtccggcatgcgcgacgaacttatctcctttttgaatgcactcgatcagcgaacccggaatcgtctcaagttcaaacaattttttttcagccttttgcagatctaagattttgtcatcatcaataatcagaccgacaaattttcggctgttcagttcccctgttgcaaatttcatgttaatcccccatcatttttaaatggcattcctttatgtattcttcctccgggcgggaaatccctcttttaaacaggctgaaaataagtgtaaaagagtatcaaaaattgtcacttttttagtcatattgacgaaataaaaccttcttggccaaaatgggttatactattatcatcctatgttttccaaaataatcgagaattggagatcacacgatgaacaaaattgaagaaaaaagattaactttattcgagacagcgcaaaaattcggaatcaatgcgacggagaccatcaggtgcagccaggagctggacagccttttaaacgggtgccggggcgggctcatccaacaaacgaaagacagcgggccgaacccggccgcacagattcagcacggccgcgaaagaaaagaggctttctcataaacgtgatatgtatataaatctgtatcatttatgtataagacccggcatctgtaaagcgccggtgttttttacgtctaaagttttttccgctcacaaaaatgtgcatttgtcataagctattttaggcaggcagcccagataagctcctggagtgcagtcatgaaaatcttcacgaaaaggatgtgctcgtatgcccgcaattgtcggagcgtttaaaattaatgccgtcggtacgagcggagtcgttcatataggcgactgcatcaccatttctccaaaagcagaggttaagacatttgccggagcgggcagcttcaataccggagacaatctcacactgacgaattacaggaattcaacgaatgtgtacgataatgatgtaatcgatcagccgatggcaggaaacgcataaaggaggcgccgtatgaatttttacgtcaatcagtcgatccatatcaattacatgcgtgtagaatctgtcagcaattcctccatactgcaaatcggaagcgccggttcaattaaatctctttccaatctgtacaacacagggagttatgttgagccggcgccgcctgtcaccgcggggcagcaggctgtaacaacagggggaggtcccggcacctcatcatttgtaccgctccagccgccaagccggtagttttaatgaaggaaacgagacgcgaggtgaatgtcatgtatgatcaatccgtttcatcctacctgcagaatttaaattctttcgtccagcagcaggcgcagcagattcaggagctcgaacggcagctgaaagaattccaaaatgaaatttcaacgctgaagcagcagccttctacaagaatcgatcggctcgagtataaatttgatcagctgaaaattgaacggctggaaggaacgctgaatatcggattgaatccgactgatccgaatgccgtgcaaaacttcgaagtcggccagacatctccgcaggtcggaatgatgcagcaggaacaggcgggccagcaaatgcagcaaatccgtcaaaacgtcgatatgtacctgaatgaagaaatccccgcgcttttagagcagctcgaaactcagtatgagagcaggctggacgaaacgaacaaatatcatattattgaagatatcagaaagcagatggacagccggattcagtattatctgtcccatgtcccgaaagaagaaaatacggcgcccgcgcaatatgccgagcagattgccgaacatgtgaagcgtgatattgtcagggccgtcgagcactttattaaacacatacctggtgaaatgaaaggtgatgatccgtcatgatttttacagtgattaaccggaatattgaagtcggcgacatccggtctactggtgtatccagttcttccttattattaatcggcgacaccgattccgtctatctgtcttccatctttgacacgcctccggaatctcttattatcgggccttatgtgccgctggcgccggaataatgttaaagcgcatttcacgcctccggaacgccaaaatcaattcagtcgggattgcgagtgtctttcaagcaggcgatacgaatgaaatcaatatgcggatcaaagtattggccgatcagcgcagtcttgctgtatacagagatgatgaaggctcatttaacaaaaaagaataccagatctttcggcagccggccgtcatgccgttaccggaaacgggagtccaaagcgcattctgccatgaaaatccttcaattcgggtaaggaatgtgaaagttcaaggggtatcgtcagcgtccgtggttcaaatcggatcgacgtcggtcgttctgggagattcgcggctgaaacatattaggcagatcttcacgccaagctcacaatcacagcagccctgacatataatgacggtgagacttctataaagggtgtcgtttatgccagcaattaccggacctatagctatcaattccatatcgggcggagtcgtaaactttggtgattccttttacctttctccaaaaagctcttctaaatctgcgctcggttcgggagcaggcaataccggagatttcctgttattaaacaacgttgtcaatgcgacaaactatatagaccccgatgtcagcgatcaaaatgtggtcggaaacgcctaaaaagcagccgctctttcagaagagggctgcttttggttcagcgttattttcgttcatttgctttttttgtttttacaagcttttccggcggctgttttctgatccatttcacaaaccgcgcgagtttcgggtcacgccgcagctcttctattcccgcgagccttgccgcaagctcctgattcgtatagagcgcgtgaacctgtttatgacaagggatgcagagcattgcggtcggaaggaatgtcccgccttcttccttaggcgttaagtggtgctccgtcagccgcacataatggcggccgcataattcacatgtaccctcggcagaatcggccataattccttctcctttctacatgatctccaatgtgacccgggtgcctttcccgcccggttcggacggatgaacgattaattttttcggcagacgcgctctcagctcctgcacatggctgatcactccgacggataagttgtccgattgcagcttttcgagcgctgtgacaacggtgtctaagagcccttggtcaagagtcccgaatccttcatctaagaaaaagaattgcagcgggtattgcccccgcagctgaatctgggcggacaaggccagcgcaagcgacagcgatgtcagaaacgtctccccgccggaaaggcttgatacgggccgtttgacgcctccgttcgcgtcatcacgcatgacgaaaccgccttctgaatcgactaatatggcataccgctgccttgtcagcgctccgagacgggcagaggcgtcccgagccacgctttccagctgttcttccgctaaaaattcgacgaatgtattgcctttacatacagactggagcttatcaagcctgtcaatctgtgtctgccagtttttcagttcggcttcaatctctttaaagcgcttatgctgtttttgcataaccgcgaaggcttttgcctgtgctcctttttcctccatggcggcgcctgactcagcctctgcctgcttcagcagagaaacggatgctgtccattcttcctccgatatccggcgctcggctaatttatcagtaacacggctgatatttgccgatagctgttttgaggtgtccagaaactcatcaatttcttttttcatttcctctgcacgcccttgcggaagcagactttttttaacttggtccggttcggtaaacccggtgtcttttgacctcacgcgccagtcgttttgcgctttctcaagagaggcctcagcatccctgagtgacatgagactccctgattcccggccttttgcgtcattcagcgattgctgcgcctgcttcagcgcatcgaatagggactgttcttttgattttaacagctgtaattcctgccgcaccgcttcaagctttgcggaaattgatgtttcttcagctgctgttccgagctcttgttcatatccgtcaatcacctgctgcaggcgctcagacgcatagtgaagctcgagccgttcccgttcaagccgatgcttcatctcctgcaggcgttctttctcctcttcatgttccttgaggaatgcgatgcttgtttcaatgcgcttctcacattcttctgcctgcctgtccttctcatctatcgaagcctgccaggcgtcaatccggtttggcggaatatgaccgcagacttcgttgtactgattcaatcggctttctgacagcgattcaagctcttctaatgaatgtctgagacggtcggcttctttttcctcgtagcggattcgttcggcaagctgctcagcttgttttaccgtctgctgatgcgcgctgatcagtcttgcgaccttctcttttaccgacagcatatcctgtttcatttgtttccattccaagcggacggcgctgaacgcttcatcaagcgggcgtccgctgatggaagaagcggcttccagctccggaacccgggcgctttgcagaaacggacattcttcggtaaaacgccccgactgttcttctaatgcaaccttggctgtcagcacttcctgagaaagagccgccgcctcagaaagcagtgcttccacctgctgcaaatgttcctgcacagcggtatcaggcgagaatgtttcatgagcggaacgcgggcggtcatgctgcgtcgagccgcatacaggacaaggctttccttcgatcagtttttccgataattcttttgttaatgcagccgttctcgcttcctctgagcgcctgcggagatcggcttgcgttttttcagcccgttcggctgcggctttcagtgaacgttccgtttcacagaccatatggtaaacggtttgcagcgtttgataagcgcgcgtaatgtcttcctcttccgttttcgctttcgctgtgagcgactcgctttctccgttgagcttctccacgtttttcagctgcgttgtcagattggcccgctctttcgtgatttgttcctgtgtctgctgaaagcctgccgccagctgtgctgcggtctggcattttttccgttcatctgcggtcacttgaactgctttcagctcttctttcagctcattctgcctgttttggccgcgggtcaggcggtctttcactgcggccagctgtttcgaggcggcttcgtattcttcctcttttttgctgtgctccgcatttgttttttccgcttcttttttcgcttcaagcagtttttgttcaatggctgaaagtctttgatacagctcttcttccttgacaagtttcggctcctgttcggccttatgggcgcgccatgcttcataggcttcattttgccgggtaaatgaaacggtttccgcctctgatttccgtttggccagttcgtgttcctgttcggctcgctgcttccggcggacggcttcggtgcagcggtctgcgtacggctcaagggcgagagctgtttccgcctctttaagacgctcagtcaaatccgtgatgtacgggcgtctttcctcaagctttttctcccggcgctcatattcatctctttctgtctgcaagttccaaatttcctggtgattttcaaaacgctcttttgcccggacccgtttcttctcagctgcttcaagccgttcgttcgcttcgtgaaactgctgttcagcctgcttcagcgcatcttctcctgcgtctccgaggccggattgttcggccagcatttcattttttttcgctgccgcttcctgcgcccgccgccgcaattttttgacaagcctgtccccgtactgttccagattaaacagacgctggagcatatgtcttctttccgcgcctttaagcgacagaaactcggcaaactttccttgcggcagcacgacggctcttgtaaagtcgtcaatggtcaggccaagaagctcctctacctttttgttcacttcattcgctttatcggccagcaccgtttgttcgtctttgatttcaatcagccggcagagggcggtttttactttcgtttcatccgttctcttaaaaacgcgctcgaccttgtaggaaacccggtggccggattgaagcgcgaatgtaaatgagacggcaagctgatcttcggcatgattcagaatgccgtgcgtattatttgcggcgcgctccacttttccgtataaagcgagtgtcatggcatcaaggatcgacgattttccgcttccggtcggcccgaaaatcccgaacaccccggctcctgacagtccggcaaaatcaatggtctgttcctccctgaagctgtggagcccttttatcgttaacagaatcggcttcatgtcgcatcctcctcatcatctgctgacgcaagctctaaaaacagcttgaccatctcctcatccggcacgccgccgcccgtttgtttttcataaaacttcttaaatcgatcctcaattgatgtgtgtttcacttcaatccggtcattttcggtctctttttcttcaaaaaccggcctgatatggataaagccgggatgcgcctttctcagccgatgaatttcctcgagagaaagctgatccgtcaaatggatatcaagatcgatccaggcattccggtcacgcccttcatcaagccagccgtgaacctcgctcagcccctgcgctttccatttgacgagcggtttaccggaagacaggaaaatctcttcccacttcgcttctccgccgggcttcgcttctaccactgtcaccgatttggcataaccggcttccgaaaagctgtatgcgagcggagagcctgaataacgggcagccgtcttggcgcgcttgatcgtttgcggacggtggagatggccgagagccacgtaagccgcatcagccggcaggctgtcagcggcgaccgtgtaggcgcccccgacttcaatcggacgctctgaatcggtctgatttccccccgcgacataaatgtggctcgccgcgattttcacggcatcgttccggcacagtccgcacatgtgagcaaacgcctctctgattttcacatcgtaatgatcgcgaagaagcttttcctcaaacgtatcagaaagcacttcgtttaatctcgcctctgacggatatgccagcgcggctacggctaacagctcgtccgccgacggcacctcaatatggacgggttctgtccgcggatagccgattaaatgaatgccgcgctcatttgttaacggagaagccgccgccagcctgtcgggattgtcatggtttccggcaatgacgacaaccgggcgttttccgccgtcagaaagcgcggaaagactttcgtaatacaattgttcagcgagcgcaggcgggttgaccgtatcgaatacatcccccgccataatgaccgcatcaatgttttcttccttgacaatggtattcagctcttccagtacttcggcctgctcgctcagccggcttctgccttccagcgttttgccgaggtgccagtcagctgtatgtaaaatgcgcataccgcattcacctcactttttgatagaaaaaaagatccgctccaaaaaggagcttcggatctcgttacagtgtaagaacgtgacctccatcgaagaaatagagcgcacgccctttcactttcgtttttgtaatttgttcaaccgcttttgtatacaattcgatttgtgtttcatatcttttttgcagaatcggagccgcgccttcaaatccattccggaatttcccctctatccgatctgttttatagtccagcaaatagagaccgtccgcagtttcgtagaggcagtcaataatcccttgcacgagcagcggttcaccggccgtttcggcatccttgtacacctcgccggccggaagcgccatactgaacggcacttcccggtcaatccgcagcgccccgagaaggtctttaccgatttcagttccgaaaaaccggacaatttcttctatatcaatggcttcctgctgctcttctgtcagcagctctttttcgtaaagcatccggaccgtccgctctgcttcttcggcagtcggaatgtgcgtcagcggtatgtgctgcatcaccgtatgcatcgccgtccctttttcggcggctgtcagcccttttttcatcataaaaccgggacgcctgtataaaagcgtgtctcctgacggtttgatgagagagcggccgctgtattcatcctcgtactcttgctttctcttcagctcagaaactgactgcttcgttctgatagccgtcagctctcggtacggatattcccatttaagcagacggcgcgcctgatcatcaaatgaaaacgaaccaggaatcggctcgccctgctgtatcgccttgagacgtttgctcttttcttcagcacgttcttttggattctcttccagcaattcactttgctgcagcatccggatgtgaaaacgcgacgggtcgcgcgcgatatcctcagacgaagaaagtcccggcgtcctgtgcgcctccatgtcacggtggcggatgagcgccggcccgataaagtccaaataagatgacgcctgatagcggtcgaattcagaaagaagccaatcagcccggtctgcttgggcctgccatttggccagctgtttttcccggtttttgcaggaaccgacgagaaacagcttttccttcgctctggtcagcgccacatacaatacgcgcaattcttcggataagagctctctgcgcatctttttcttcatcgccacaagcggaagagtcggatagctgattctgagttccggatgaatatacttcgtgccgaaaccgagctctttatcaagcaggtatgatttgttgagatccatcatattaaaacttctgccgagtccagcggtgaaaacgacgggaaattcaagtcctttgctgctgtggatcgtcatcagccgaacgacatcctcctgctcgctgagcgcacgggcggtccccagatcatcgccgcgctcctgcatccgttcaataaaccgcaaaaagcggaataacccgcggaacgccgtcgcttcgtacgagcgcgcccggtcatacaagacgcgcagattggcctggcgctgctttccgccgggcatgccgcctgcatagtcaaaatatccggtatcgcggtatacttcccaaatcagctcagacaccgaatgattcgtcgaaaatgaccgccacttttgcagactgtcataaaaggttctcagtttttgatacagttcatcatgcctgtcaccgttcgctatatatgctttcagcgcttcataaaacggcgcttttttcttttcaaggcgtatcagcgcaagttcattttcgtcacagccgacgatgggcgagcgcagcacggaagcaagcggaatatcctgatacggattatcaatcaccttcaagactgaaagcgccgcagccacctccacggcttcaaagtaacccgacgtcaaattggcgtacaccggaatgccctggtttttcagctcttccattaattgcggcgcccacggcatggagcgcagcaaaatcacgatatcccggtactggatattccggtgtgtttttgttttcccgtcatagaccttaaacggagacgagacaagctttcggatctccccggctatcgctttcgcttcccaatgcacggtttcaaagtcttcggcatcctcggagctgtctgcgtcatcagcgctgtcaatcagcagcagttccgtttttgccgcgtcattcggcggatacgatgcgccgagcttcaatgccgcctgttcatcgtagtccacttcgccgatttttccgcccatcagctgcttaaacaagaaattcgtactgtccaaaatatcggaacggctgcggaaattttggttcaggtcaattttctgccccgcgccttccccgctttctgtaaaccttttatatttcccgagaaacagcagcggctcagcaagtctgaaacggtagatcgattgtttaacgtcgcctaccataaacagatttcccgcctcttcatccccgcttttcacaagctgcaggatagactcctgcacaagattggtatcttgatattcatcaaccagaacttcatgaaactggtcttgataataaacggccgcttcgctcggcacccgccggccttcttcatcaaccgcagttagaatcgccaggcagtaatgttccaaatctgagaaatcaataattgatttttcttgtttcgccgcttcaaatcgttttccgtacgatatcacgagctgaacgagcgtttcgatgacaggcttcatatctgttaaactcttcaagtgatcttgcggacttcttgtaaagtaatcggtctttaacttttcgatcagtttcttcgcgccgtttcgcaaatcggtcgcttcgtccaaaagcgctttgtcaaattcatcaccctttaccggcttcgcccgcttaaatgagactgcggggacccgttcatacagcgcatcgaagtcatgccggcagctgatcagctcttctatctgctgaaggtcatccagaaaattaccagcgcgcggggccggcccgccgggcgcttttgtcagttcaagcgccttctcaagcttttgttttgccccgaagagcgccatttccgcatcttctctcacatactggtaaaacggaagctcttccattttgctttcttccgtcacgtcatacaagcggacaaagctctgcagccacgcttccgggtcaggatgcgaccgggaatactcgtacacccgtttgacaaggtcttgaagatccagatcatgcctgtctgtcgtatatctgtctgcaagctcaaaaaacgcctgattcccttttgcgtattcatcttcaaacagctcatcaagcacttcgtctccgagcaattcgccttccgtctggtcagccatgcgaaaaccggggtcaagatcaatcatataataatattttttaagcacttgcagacagaaagagtgaagcgtcgaaatgctcgcccgatttaatagagagagctgccgtctgatatgcagagatcccggatttttggcgagctctttttctaatgcttcagcgatccgatgcttcatctccgctgctgaggcgtttgtaaaggtcaccacaaggagcctgtcaacatcaacaggatcttcctccgcggttatctttctgatcatccgttccacgagcacggccgttttacctgatccggctgcggcagcgacaagaatatcgcggccggaagaaacgatggcgctccattggtcatccgtccatatgctgtctttcggtttaggaatttgcatcatcatccgcctcctttttcagccaatccagtatggtgccgtctttttccgctttcaggctgcggtattcattttccttaagcgactcatcaaactggcaaaccgatttaaacgcacagtacgtacaaggcgtcttatctttcagcttatacggggtaatggacacaagcccgtccgttatcgcttcgcccgcctgttcaaatgtccgccgcacgtggtctgtcagcagatgaaagtcctgttcgctgaccgccgctgagtcggatcttaaagacccgtcctttttcaaaccggcattgacgatatttgaacgcccttcctccaaagtcgtgtccatcaggctgatcgcctcccggtcaccgaggagaaggcctttcattttaaatttcttgaaaatttcctgctcgatttcatcaagccccatcggcagactggcctgaatcatcggatcatggatatggaaatacaaaacgcctgccggggtcgctttcatgccgagccaatccgcagaatgtgtaatcgataagtcaagatatgtgagcatttgcagagcgagcccgtaatacacctcagccagatcaagccccctgtcgcttgatttataatcaacgattctcagcagcaggccttttgaactttccgctttatccacgcggtcgatccgtccgacgagttccatcgtacagccgtttttcagcgtgaaagtgagcggaggcagcggtccgcttccgccgaaaccgagttcaagaccgaccgggacgaaaccgctcgccttcgcatgctcgcttaatatgccagaaacacgcgtgacgatcttctgcagtttttccttcacgtaaaagtgtctgtttgagctgagcagaatctctttttgcagctttggcgcaagccgttccaccgcttcataggagaaattccggcactgatctttcgtcagatcgcgccattccagcttctgctcacgaagccggtctgaaatcagcttcagactggagtgaaacagctggccgatatccggcgcttccagcttgaaaaactgccgctcttttaattgcagcccgtgagatgcaaaatgagaaaactggcaggcattaaacgcctccatccgggaaacgcttcctttaatatgctcgccgtaaagctggcgcgaaacaggccgttcaagacgcttcgcctcattgcggaaaaataggcttgaaaacagctttttcgcacgctggtgatcagactctttcatcagcacattgtatgcgctccaccatacgtcactgatctcgtactctcttgtccacagcctgagctgacttgccgtatacgtctgagccacctgtttattgacgagatactgaagctgctcttcttcgcttacctgctcgggatcagccgctgacagcttttcctgatgatcgggaaacagctcgccaagcctgtttacaacgattgacggcaggagcgtttttccttccgcatcggcaatcgggtatgacacataaagacggtcagacggactcgacagcgccatatagatgagaaaatgctcatcaagcagccgctcacgccccgcggaagacagctccactccgaccgctttcagccactcccggtcatcatcagacagcacgccgttttcatccgggcgcgccggaagaacgccgtcattggccccgatgacgaatgtgcaggacgtgccgtatattcttgagagatccatattccctacaaatacttggtcaagcgcaggaggaattaaagaaaaatgaagcgattccgttcccgtttcaagcatttgctggaacagcgccaaagatatttcatcttcacccatcatgccggcaaactcctcgagaagctggataacggcatcccacgcctggccgtgctgctgcgcttcgatcatgtttccggcctcttcggcccgctgccttttccggtccagcttcaggggaacatcggtatcttccaaaaagagataaagagcctccgccatgctttgaaccgttttcgcttttttcatccggttctgcagccggataaggggtgcagctatccactctctcgtctcattcagcatgtgttccatctcgatttcctgatccgtctgcgcgaaatcctcatcgagcgatacgaagcgcctgtatacaaaccgctcgccgttcgtccagcgctcccctttaatgccgtaggcgatacagtaattttcaagctgatctacctgctctcttattttctgctccggctgatcaagcgggaataacagttcggttttcgcacagcggaacaccgcttcatatctccagttccccttcacgacatccaggcttgaacggatgaattcaataagcgggtgatgctgcatagaagcttttccgtcaataaaataaggaagcccgtaatcggcaaacacttccttcagcaaatctttataatcttccggctgacggatgagaatcgccatatctttgtaccggtatcctccgtcccggacaagcgattgaatttcccgggcaataccttcgagctcagctcttctgttttgcgcctgcatgacggtaaaagcttcctgtccgccggtatacgcggcggcgggacgcacatcgtactgcgactctatacaggcaagctccggcacatgccgatgccgcttcgtgccatgcagttccttgcaggaaatatcggcattcaattcctttgccgtctgataaagcttatagtatgtgcttcccgtcattctgaacagatcgagctcatccggtgcctgttccgccgaagggctgtccgccgtcagcgagaatgtgacatgttcagcatgcatgatcagctgctccagcacccttaattcctgcggcgtaaattgatagaatccgtcgacgtaaacacgggcgccttttacaacgtccgccaaaggaatctgctgagcgagcagcgtcaaatagtcctccgaatgcagatagtgtccggcgaggcttctttccatctgctgatataaaatgcctaagtcatgaagtttttcagacagcatccgctctccgcgatactctgacgccgttccgctttccgccatgcggcggacgtcttcaggctcaatacagtatcgcttaaactctgtcagcatccgttccacctgctcagtgaatccggctttgtcactcgctttttgatacactttaaaatcgtgcttatgttcttcaatcagtttccttaaaagcatctgcacacccgtcgtcgtcacaaacggacggttcatgcccccggtatgctgaagcacgcgccacgccaaacgcgaaaaactgaacacttgagcgcgtatcatgcctccgatatccggcgttttagcaagctcatattccattaaaaacgtcatttgatccgggactagaaaaatgatcggtttcccgaacggctcccggcgcagttcatcttgaatgctgtcgataatcagcctcgttttcccactccccgatctgcctactaaaaactcaacacccaaattagaagacccctctctttttatctttctacattttatcgaaagttgacgaaaatgaccaatctcatctgctggtaaaaacgggatgactgttttaaaacatatcgtttttgaccaaattaaagaaaaaaaggattaaatatgatgtcagaatatcccgaagtgattgtgcgaacgattctgtcgttcagcattctgtttatcggcgcccgtatactcggaaaacaaaccatttcacagatgacgctttttgatttcattgcggccatctcgctcggcgccatcacagccaatctgtcgtttaatacaaaactgccgattcattttactgtcagtgcttacacgatttttgtggttatcatttatcttgtcgcatatctttctatgaaaaacagaactgccaggggtttctttgcaggcaaaccgaccattatcattcaaaacggaaaaatacttgagcataatatgaaaaagatgcgctataccctcgactacttgaaccagcagcttcgtgaaaatgatgtatttgacatttctcaggttcagactgccatcattgaaacaaacggcagcatgtcagtggaggtcaaaccggaatttgcgcccgttacaagacaggatctcggcatctttgccggacatgaaaagaactttgccgttgagctgattatggacggccggctggtaatgaaaaatctggaagaaaaccacgtatcggaaaaatggctgagagaagaattggataagagaaacctcaaaccggaagacgtcgtatacgctgtgcgcggaagcaacggccggctttttgtcgacacatacgacgaccatattacatcgccgctggatcaagaataaaaatgacatccgcacatgtcacgggctgccgccgtataataccctataaacatccgggggtgagtccaatgcacgagaatttttttcattatacagccatctgcagtgacgattctgtgcttataaaggatctggtaaaatccataaacggtgaatacagcgctgtgatttgctactcaatattagccgaaaaagcgccgaccgcagaaatcagaagacgaatcgaacatatcagagaggaagaagtgcgccacatgcacgctttctcttcactgtatacgtcaattaccggaaaacagttgacgccgaaacagacggagcattgtccgcacacatacagagaaggactgagggcggcgttttatgatgagcagaaaacgaatgatttttatttacaggcatccgatagagcggtgcatccggaagcgaaacggttatttgcccgcacggcatttgacgagcagcgtcatgccgtctggtttttatacgatatggcccactctcctttccaccatacagggggaacggtatcaaactcgccgaacacaagctacaccgaggtaaataccggaaaataacgattcagacgctccccgctgggagtcatagacggcaaaccccgttctttcaacaggagagaatggggtttatttttcgagccgtttttatacttccactaaacaatggataacttcttcattgtatagtcagcaaaaaccctttataataaaataaaccaactggtcggttttaaacgaaccgagccccgctttgccgggacaacgatatgaatgaggcggaaaggatctgtgtgaagtgacaaatacaaaaggcggtgccggaaagagcgaaaagacgaagaacaggctcgtatccgcttcgcgtgacttatttgcaaaaaaaggatattcagaaacatcgattcgggatattttagaggcggccgagatcagtaaaggcaatctttatcaccattttaaaggaaaagagtttctgtttcttcatatcatggaagaggatcaccgcgtgatgatcgagacgtggagggaaatggaagctgatctgaaagatgctgccgaaaagctgacgggctttgcggagctgctcagccggatgagcatcaattacccgcttatgagagcaagtgaagagttttatgcgagtgcgtttacgtcagaggaggtcgtaaagcggctcaacaaaattgatattgaatatgacgatgtgatgagagagatcttagaagaaggaaatcaagacggaagctggtccattcatcatgtcgaatcaaaagtaaaaatcctgctatccgtcttctacggtttagatgtgttatataaaaacgataccattcagcaaagaatcgaattgcaaaaagaagccatctccgtgtttattcacgggtcgatcaacgctgataaactgaatgacagctgacaaaggagaaacaacatgcaaaaaccgatcagagaacaaaaggctgtactcatcatcttattaagcaacatatttattgcgtttttaggcatcggattgatcattcccgttatgccgctgtttatgaatgtgatgcacttgacgggcagcacaatgggataccttgtcgctgccttcgccgtcgcgcaattaattgcatctcccattgcggggagatgggttgaccgtttcggcagaaaaatcatgattctcgccggactgtttttgttcgcattatccgagctgaccttcggattgggcacacatgtctccattttatatttcgcaagggtgctggggggcatcagtgccgcttttatcatgcccgccgttacagcgtatgtcgcagatattacgacggtgcaggaaagatcgaaggcgatgggctatgtatctgccgccatcagcacagggtttatcatcgggcccggcataggaggatttattgccgatcacggcgttcgtatgccgtttttctttgcggcgggaattgcatttatcgcagtgatttcctctgtctttatgctgaaagagccgttaactaaagaagaacgcgcaaagcagatggaaagcgccaaagaatcaaccttcttaaaagatttgaaaaagtcgattcatccaagctacttgatcgcctttatcatcgtttttgttttggcattcgggctgtcggcgtacgaaacggtattcagcttatttacaaaccataaattcggcttcacgccaaaggatatcgccattattattacgttcagctccattgtggcagtcctcattcaagtgctcgcgttcggcagacttgtcaacttcctcggggagaaaaaagtcattcagctttgtctgatcatcggcgctgtgctggctttcgtttctacggtgatgtcagggtttttgcccgtgctcgctgtcacctgcatcattttccttgcgtttgatttactgcgcccggcactgactacttatctatcgaagatcgcaggaaatcagcaggggtttgttgccggtatgaactcaacatacacgagtttgggcaccattttcggcccggctctgggcggtattttatttgatatgaatattcacttcccgtttctgttcgcaggtgtggttttatttctcggtctgggattgacgcttgtgtggaaaggaaaagcgggcgaggtttcggagtagggtgcactcacccatctccggagctttttttatgttttcgataagaaaaatgaatggattatgagaaataattcattatttatttatctcaaaatctatactatagtaatagtaaggttaacgagcttaacaatttaatatgaatgtttcaggaagaagggttttcattgaagaaagacaaacatctccttacggatatctggtttattctcatcagtgcggcaggggggtttcttctttcgcttacagggatgtcgatcgcctggatgctcggaacgcttgccgccggctgcatcctctccatgacgaggcccggctggctgttcatggcgcctgacagaagagggattcaccgcagatggcttgcggcgggacaaatgatcctcggcatcgaactcggccagaaattgaacctgtccgttctgtcggttttacgggagcattggcttccggtaggcttcatgctgattttctctatcgtgatggcgcttgtttccggatatgtgctctttcggttcagccggacggacatgatgacaagctttgtaggaacggcgccgggcggtttatccgccatgccgggtatcgcccaggaagtcggcgcaaacaccgcgattgtaagccttattcagctgacgcgcgtccttttggtcgtcatgacaataccgtttctcgtcattttcttatttaccaaacaaaacggtgcggctcagacatcagccggagccgtttcagcaggagcttcacatccgggccttattcccgtcttgttaacggccggatttattttagctgcctggcttgcaagtaaaggcgcaaaacggctgaaattccccgccccttggctgctcggcagcatgatcggcgttgctgctgcggaaatcggcgtgtccgccttggcgggcaaagacatgctggcctggtggccgccggaagcgaaccagctgtcacaaatttttctcggcgccacaatcggatcaaaaatgtacaaaagcatgttcaccggtgtgacgagagtgctgaccgtcggatttatttcttccgtcggattaatcgccgccatgattctgagcgcggttgcggtttctaaattaacgggcatctccatgattacatctgttctcgccttttctcccggcgggatcgccgagatggcggcgacttcgatcaccctgcacgaagactcgactttcgtcgtcgcggttcaggtcatccggatcgttctcgtcatcgccatgcttccgcccttctatcggctgctgcaccacctttctcagctgaaacgggcacacggcgaaagaggccgggcagaaagaggaacatgatccgaataaaaaaacacgcatccatatgcgtgttttttatttgaacagctctccgccgccatttacagaccgccagtttgctgacagatcacggaacagccgttcagcaaataacagttcttcatctgtatagcggtctaaaaacgccaagagccgctgttttatcaattcatgatattcatgatgaagggaatgcagctctttcccggcaggagtcagccggaaatagacttcttttttattgtcactcagccgggttctgcgcagaaagccggcttccaaaaacttcgcgcagcttctcgacacggtcggctttgtcgtcttcattttttccgctattgacgtgacattgatcggttcatgatctccgatacacgacaaaatgtgaatttccgtcaaggtcaattgtaattttttcccgtttccttcgcggagttcatccatccgtccggccaacgacgccctgatatcctcctgacacctctcctgctcgtgaaaaatatcggtcagcccttcaagaatcatgtgttttgcatggtctggctgtcttctgtccaactgctgagtcacccttccgtattgattgtttcttttactataacgttttgttacataagaaacaatcacacaggcgcataaaaaggttatcagatgaataatccccatctctccaaaccggccagaacggcttcttccgcttcacgtcccgagccgccggctgcccatgccgcatggccgtccggccggattaaaacggtgtggacgtcattccaatcggcacgtgtttcagcaagctccgccctgactgccgccacgctgtccgtatcaataccggcgggaatgctccctcttaatgacagaagcacaaagccgcccttgcggagaaaatcatacagccgggccggccgcccgtcatgaagggtcagttcgatatccggcaggcgttttccgttcagggtatgcggcggcagctccgcatccggttcataatgcagatcaagcgcggatacttttcccgccaataaacggttggactcctgaaaatccagcaaagcggtcatcgtttctcttaatgccatccccgactcggtaaaatccatgagctttatctgcgttttgatattgtgcagcacttcttttcctgtgctgtgcctttcctgatgatagctgtccagaagatgaggcgccgcttttcccttcatttgcgccgccagcttccagccgagattgacggcatcctgaagccccgtattcaggccttggccgcctgcgggaaaatgaatgtgcgccgcatccccggccacaaaaatccggccggagcggtactgctcagcctgacgctcggcattgccgaaccgcgacatccataccggatcactcaatccgaaatcagtgccgcatatccgccgcaggtcttctttcagctcatcttcggtgacccgctcttccttccgcttttgcgggacatgcggagaaacgatgaggacacggaaaagtccgtccgtaagagggataatcacaaccgatccctccagccggcacgttgaaaaaaaggaagattcgggcggatgtttcaaagcggcatcacaaagggttcctgttaagtcggcatcagtgcccgaaaaagcgatgcccgcctgtttccggacaatgctccccgctccgtctgtacccgcggcatataagctgtgaagagtgcggattccgctttcgtcccggaacaccgtctccactccgtcatccgtctgggtgacagccaccgcttccgccccgcggatgatgtctgcgccgagacttgatgcatactcctccaacatccgctccgtttctgcctgtggcagcattaacgaataattctgcttcgtatccagccgagaaaaatccagccgtgtatccagcatggaaaaatggccggaagacaccttcgtccctttttccaagaagcgttccaatatgcctctcatggcaaaaagctcaagtgtgcgcggatgcatgataagcgctttggaatacggcatcgtcttcttcaatcgttcaatgacagtcgttttcactccggccagcgccagttctgatgcaagcataagcccgaccggacctcccccgataatggcagcctgtgttttcatttcatcagccctctttcatatttttgttgcgcgcgtaacaaaaatatgaaaaataaaacacctccttttttgtttcgcgcgtaacaattttcattatagtctttcctccgctttttgacaatcatttccgaaaaaaagacgccgttcacttggcgtctgattcactgatgactccgacaatgtctttatccttaatcggaccgaaatgacggctgtcgaggctgtatatgcggttgtcgccaataacaaagtattgtcccttcggtatgcttttgcgcccggtcgtttccttcagcgtataatcaccagtcacatggctcccggcggacaatgatgactttaacggttttaaaaacggttccgccacccgttttccattcacatacagctgatcctccctgtatgcgattgactcgccggggagcccgatgacacgtttgatcagcactttgcggtgcgggcctttaaacagaacaatatcgaaacggcggatcgttttgtaacgatgggaaaacttgttgaccatcagctcatttccttgtttaaaggtcggattcatgctgattccttcgactttataatcaataaaaatggcattctttaattgtatggccaaaacaacgataagcacgccggctataaaccaaaatcgttttttcaagattcctgtctccctccgtctttctcatgctgactgattctcgtctgtaaacgccgttcgatatgctttccggcataccacagcaccgcgatcaccattatggcgcccgccatcctgaaaggctgtgtaatgagtgcgtgaagatcatacccgataaaactgatcataaagatcataaccattttccccatcgcggctgctgatataaactgcagcgcccccacccgtgacagaccggcaacgatatgaaccgcagcggacggcgtaaaggggaagcaaagtaaaataaacagcggaccgaaaccgtgccgctcaacccagagcatcatccgccttatggtctgatgcctgcggatgaaaccgaaagctcttttctgtccgaaacggcggacggcataaaacatcagcatcgatcctgacgcagacccgagccatgacagaaaaaaaccttcccacaaaccaaatgcattcgtattcgccaccacaaatacaacgagcggcaaaaacggaagaaacgcttcaataaaaggcaatacagccgcagccgccgggccgaaagctctatagctttggaaccattccgtcagctgttcctcagtcaaatatgataaaaaatgctccaacgtttatactccttaacgagtttgtctatccttattctacacattatctccaaaaaacgaaaatgtttacgagattttccgtcttgaaatatcgtgtaagcgagtataaaataagaacaaacgttctcttttttaagaaagaaggagtatttatgcctgacattcggagcggcacccgcgatctcatcgaaaaagggctgtttctgcccatggcggccgccatcctgaaccgggacctcgaagcgcttgattcgtgcccgttcaaattaaaacaaccctataaacagcttatcagctgctctttaaaattagcacaaaaggatttgagtgatgttcgaaaagagttaagaaagcgtaaaattaaaatatacgaagcggaaagagacgaagcatttacgctttatatatgcaccattaacggctatgaagaaaaacaccgttatttcaacccgagaatacgggaacaggtcaccgccttattggaatattacctgtctcttgcgaccatttaaaaagcagccgggcctgcttttccttttcaaaaaataaaattcagactattcacactatacattcgacatgattttctttataatcgggacacgctgttttcaatgaaaaggaggaatgttatgaaactgattcatgttctcgccgccctgccctttttcggaattctcgccggcattccatttgccaaccgggtgacgccttatgttttcggaatgcctttcattctcgcatatgtcgtcatctgggcggtgctgacttccgttctgatggccgccgtttacaaattggacaaagaaaacaaggcgggtgagacggaatgaatgcagcatttcccgtaatggccgccgtgctcctgttttgtgtatatctcggaatccgggcccgaaaaggaaaacatatggaccttgaacaatggacggtgggcggacgcggcttcggcacgatgtttgtctttttattaatggcgggagaaatatacacgacctttacattcctcggcggaagcggatgggcttacggaaaaggaggccccgccttttatattatcgcgtacggctgccttgcctacattttgtcatattggcttctgccagccgtgtggacttacgccaaacaacacaaactgatgtcgcaatcagattttttcatttcaaaatacaacagcccgctcctcggcattctcgtatcgctcgtcggcatcgcatccctcatcccctatctcgtcctgcagctgaaagggctcggattaattgtttcagcaacgtcatacggacagattccgccctccgccgctgtctggatcggcgctgtctccatcacgatttatgtgatgatttcaggaatccacggttcagcgtggatatccgtcgtcaaagatatcatgattttaggcatcgtcctgtatttaggtatttatctgcccattcattattacggcgggtttacggagatgttcaaacaaattgacgccgcaaaacccggttttctcacgctgccggaaaccggacagagcgtttcctggttcagctcaacggttttgctgaccgccctcggcttttatatgtggcctcatacctttgccgcttcctattcggcggagcatccgcgggtgtttcggaaaaacgcgatcatcatgcctctttatcagctcgtcctgctgtttgtcatctttaccggatttgcggcgattctgcaggtgcccggtttaaaaggggcggacacggatctcgccttattaaagctgtctgtgaaaacctttgatccctggtttgtcgggctgatcggatcggcgggcatcctgacggcgcttgtacccggttcaatgatattaatggcctcaagcacgctgttcgccaaaaatgtgtacaaagccattctgcccggcacgactgacgaaaaagtctcacggctcgcaaaatacgccgtacccgttatcgcgctgatttccgtatattttacgctgaaaggcggaaataccatcgtcaccttgcttttaatgggctacagccttgtcacccagcttttccccgccctcttattcagcctgccgaagcggcgtttcatcacaagccacggcgcttttgccggcataacggccggggtcggaacagtggccttcattacgctgaccgaatcaaccgtcggaaccctctttccgtttcttccgcagatcattaaggatatgaatacaggcatcatcgcgctggttctgaacattgccgtcatgtttgccgtcagcgccgcagtcagaaaaaaacaaatcagcgcagccgaaaaggcggcttaatgataaaatagcggtaagacacatgaagggggaaagccgcatgatcatgacaacgaccgaaaccgtcgccggaaaacagattacggaagtaaaaggcttggtgacaagcagtatcgtccagtcccgtcacatcggaaaagatttgcttgcaggcttaaaatctgtcgtcggcggcgaattgaaaagctataccgaaatgctggaagactccaaaaaagcggtgaaagagcggctgatcagagaggcggagcagctcggagcgaacgccatcgtcggcctgcggttcgaactgaccgcaggacagaacacatccgaattaatcggatacggaaccgccgtcaccgccgaatccatttaaaaaaacaagcctctttagagaggcttgtttttttatttctcacatgcgatatagtctttatcccggtcaagtcttttatttgcattataaagcgcttttgatacatacggcttgtactttgttctgccgcccttgtttttcactttcgacgatttggccacgccgcccttatacaccttattcagcgccttacagttttgatacgtttttacctttgttttcgcttctgccgtctgccccgctccgtatgaacaaccgaacaccaggccgaaagacaaaagcacagctgccgtctttttcatttctatcctatcccctttcctgaatcatgttgtatgactgaacatatcatagttcaaataatctccatttacaagataaataggaaaatagttttaatttacgtccgcccgtatatcttttatggaatttttcccaaaaccttttataatatgaattgatagcgctatctgactatgatgataggaggagaaatgatgatgaaaaaagggcttgttgcgggtgttctcactacagccgttctattcggcgcatgtacggcggatattccgggggtgatcagtcccaatacggcggaagcggcgtcccagctcagtaaaggaatcggcggaagggcctatctgaacagcacgggctcagttctcgtcacgaaaattcagcttccaagctcgattcaggtgtcaaatgggacagcctatatttactcaggatttaccggaggcacagaggctgatatcgggcttcagtacagtgacacctatcatgtatggaaaccgatcatgaaagtcggttcaaagggacaaggccaggtccggtatctggaaggagaaagccaattcacttatacgaaaggcttccggcccggcagcaccgtacagctgaccatttacaaaaatctgaacggcaatacccgcgccacatattggggcacgaataatgacggatacaccggccgcatcatctcagaactcgcccaaaccaatgtaggctctgtctcaaaatggaaagcgctcgccaccgtcgcggtcacatcagaggatcagcgcccttacatcaaatcaaacttctcgacagcctttacgaacatcacgatcgacaataaagcagtcacacctgtgattgatacacaggattttgccaaattgacagtgtcaggcagcaccgtcagcatgtctgtcgtcaaataaagaattttgaacgcacgatttctttcatcgtgcgtttcgtaagggtctgccggatacgcaaatcccttatttttcggattacgtttaataaaaaaacagccctcctcagggttgtttttttaacatttctttcattatttccgccaaaacgctgagcagtccgccttatccttgatattaaattgaatcatgcgttcaagcagctcataatacaccggttcagtccattgaattctgaacaaacgggaagtagcgctgtagccggcacgggcaatgtcgtcggcaaaatgcgcaattccagcttcttcgggagaaacacttacatgatgctttgctgccgcaaagccgataataaaggtgccgtgatcggtaaacatcggcgtgttccacttgatctgcggtgttaaacccgggaattgctcagacgtccacgacaggatttcctccattcgcagacgatggtcagggctgtcgatacttgataaatagtctttgaaaacgtccatgtcttcctccttcaacatcacgtccgctaacgccaaaaccccggattttcagctttttctttgatgttaaattcgatgatcttcttaagcagatcatagtgcaccggatcagtccaccgaattctgaacaggcgtgaagaagcgctgtacccggcttgggcgatgtcatcggcaaaatgctccatcgtctctttttcaggtaaaatgctcaaatgattttttgccgcggcaaacataatgatataggtgccgtgatcggtaaatgtcggtttgttccacttgatctgcgcttctaagttcggaaattggtcagccgtccacgacaaaatttcctctgctttgagacggtgatccgggttatcgatttctgatacatattttgcaaacacatccatgcccatctctcctaaaatgaaatatcattactctttacatcatcatagccaacagacggacacgatacaactctatccgggcatgtaaatcgaaaaagcccttcccaaaaggaaagggcccgtccctttacatcacagctttctctaatatctctcccccagctcccgcaaaataaagtcgtagatcattcttgtccgctcttctttcggatacagcatgaattcctgccgcttcgggatatgactgcccatcctgtcctgaaaagtggttctgagataggcggttctgtaaacctgattttcaaaagaatgataggatacttccagttccatcgttttgccgtttgagaacgtgaccgctgtgtcatcaaatgccgtcggttgaaaatctttaacgtgcacatgagatatccagccgcattgaggccttgcagaagaaagtgtagggaataaaaagatgtgatttgaagggtccaccataatcggcggcttgtgagaaattttaatcgcttcatatgttcccgcttttctcccggcatagctggagccaaagtagcggcagcttctgtcgatgatgtgaatcggcttcatgctgacatacagaatgcagtctttttcaatgaccttcgaccccattttaccgtctatttcctcaggcaaaacagcgatggttgaacgatttacttcgtagctttctaagggtgcgtgtgttttctggcacatgatgtgcagcctccaatccttttcttgaaaatttatactaataatctatcatctgtaattggaaaacgacaggttttttttgaatatagctaaaaatcaccttttaaagctgtaatttagtcttaaattactatttaaatattatttttctttttcatttcacctcatttatacaatgatcattttcgttttttcgtcaatttgcaggatatgtcgatatatttccaagtattagttatctaaagattataaaaattaattgatttttccggccgttatccatatactataaaaaaggcattggggggattctttatgaaagagaaaaagtcgtacactgagctcatgaagtcccgcaacacggaaaaagcaaacgaattcgatgtgacaatggccgatatttacattcaaatggtgcttgatgaatccttgtataaacgccggatcgccatgctgacaatgcagattaataaggcgcttgatgataaaaataaagaagcgttcctcacgctttcaaaagaatatgccgctctcaaacagagtgaataagccaatccatatggattggctttttttacattatccgtttacgatggtgccgccgttcacatgaatcgtctgtcccgtgacataggaagaatcatcgcttgctaagtacaaatagctcggcgccacttcaacaggctctcccgggcgctgcatcggcacgtctgagccgaagacttccacttccttcgccgagaagctcgccgggatcagcggcgtccagatcggccccggcgccactgcgtttaccctgatgccctgagtgacaagagattgggaaagagatcttgtaaacgtgacgatcgccccttttgtcgctgaatagtcaatcaatgttttgtggcctttataggcggtaatggaggccgtattaatgattgaacttcctcttttcaggtgagggagcgcggctttcgtcaagtaaaacattgaaaaaatattcgtctgaaacgttctgatgagctggtggctcgtgattttctcaatccccggctgcacgtgctgctcacccgcgttgttgaccaggatgtcaatggaaggaaaggcttggcccgcctggcggatgacatcgttgcaaaaggcttcgtcgccgacatcccctgcgatcagcagacacttcgccccttctttttctacatattgcttcgtctcttcggcatcctgatgctcatcaaagtaaacgatgaccacattagcgccttcctttgcgaataaaacggatacggcgcggccgatcccgctgtctccgcccgtgatgatcgccgttttcccttcaagttttttcgccgctttcggtttgtcaaaaacggggcgcgggtccattacatattcaaagcccggctgccggttttgatgctgcggcggcaaggttttcttcttctgattcgccattttgatcactcctttacattaattactatattatgagtaatttgagcatcttatacgaatttcatgtatgaacagagtcttattggaaaaattaagaatatacaacagaggaggtaaatctgaattgactactttttcaaacgaggaaccggcttcctattggaaagcaacagctgacattccttcctttcccgccctcactgaagatacggaatgtgacgttgcggtgatcggcggaggaattacgggcctgacaacggcatacgaactgacgaaaagaggtttccgtgtcgctgtcattgaagcagaccggattttaaacgggacgaccgcgggcacgaccgcaaaaatcaccgcccagcatgatttcatctatgccgatcttattcagcagatcggcctgaccagcgcaaggctgtatttcgaagcccatctccgcgccatggaagacatgaagcagatcatcaaggacctttcgattgactgcagactgattgaacaagacgcatatctttacaccaatacagaatcaggcgtcaaaaaaatgcgcagtgagcaggaagcttataccaagctcggtattgaacacgagcttgtgaaagaacttcccgtccccgttgattgcaggctcggcctcgccatgaagaatcaggcgcaattccatccgcttttatatggtgcggcgctcgtcaaagagatcgttaaaaacggggcgcggatttttgaacagacggctgcgatcgacataaaaaaagaaccgcagccggaagtggtcacgaaaaacagacacggcatcaagtgcagctacattgtctgcgcttcccactttcctttttatgacggaggcgggctttatgccgccagaatgtatgccagcagatcctacgtactcgcggtaaaaccgaaacaagcgtatccggacgggatgtatctcagcatagacaagccgtccagatcactgcgatacaccgatttgaacggtgaaaaactggtgcttgtcggcggtgaaagccacaaaacaggccaaggaaaagaaatgtccgggcattacgaagcgctgaaacaatttgcggaagacacaatcggagttgaaagcatcccatatcattggtctgcacaagaccttgtcaccattgacaaaattccgttcatcggtccgatctcaggcgatgaagaacatattttggcggcgaccggttttaaaaaatggggcatgacaagctcagcgctcgccgcgaagcttttggctgatcatattcaaaacaaaaagaacccgttttccggcctgtttattccgtcacgcttccacgcagatcccggactgaaaaaactgatttcctataatgccgacgtggccaaacaccttatctcgggcaaacttgagaggccggacgcttcgcctgagagtcttgggcccggggagggaaaaatcgtaacggtaaacggcaaacgggccggcgcctataaagatgaaaaaggctgtctgcatcttgtcgatacgacatgcacccatttaggctgtgaggttgaatggaatgacggcgaacggacgtgggactgtccatgtcacgggtcccggttcacacccgacggcggggttgccgaaggtcccgccatcaagccgctgaaacgtctcacccaagattgactaaaccattctgtacgaatggttttatttttttccgcattaaaatatttttatcagattccttcattcaagttccttccaaaccgataaaaagaaaaagagaatatctgggggaactaatattgttatttaaaaaagaccgcaaaaaagaaacagcatatttttcagaagccgatggaaaaaaacgcatcgcgctttcaaatcaatatgcagatgtccaaaaacagctgaaaatggtcaggctcggaaacgaagaacttcatgtgcttgaagagctgcagccgttaattaaagaacatatctcaacaatcgtcgattccttttaccgaaacctggatcacgaaaaatcattaatgacgatcattaacgaccacagcacggtcgagcgcctgaaaaaaacattacggcgtcatatccatgagatgttcgccggcacaattgatgatgaattcattgaaaaaagacagcgcatcgcttccatccacttgcggatcggccttgaaccgaaatggtatatgggagcgtttcaggatctgcttctgtcgatgatgaacatatatgaagcaaccattccggatttgcatgagcttttaaaagcgatcaaagcgacgacgaaaatattgaatcttgaacagcagctcgtccttgaagcattccagactgaatataactgccagcgtgacgaacaagaggaaaagaaagcccgtcttcatcagaaaatccaggaaacatccggatcactcgctgatttgttttcagaaacgagcagagccgtgcaggagctggtcgataaatctgagggcatttccgaggcgtcaaaagccggcaccgtcacttccgtacatgtcgaagaaaaatcaatcggcgggaaaaaagagcttgaaagccagcagcagcagatgaataaaatcgacgccagccttctgcagattgaagaagaaatggacaagctgaatgacatcgcccagcagatcgaaaaaatcttcggcatcgtgacggggatcgccgagcaaacgaatctcctgtcactcaacgcttcaatagaatccgccagagccggagagcacggcaaagggttcgccgttgtcgcgacggaggtaaggaagctttcagaggatacgaaaaaaaccgtttccaccgtatcagagctcgtgaacaataccaatacacaaatcaacatcgtgtccaaacatattaaagatgtaaacggacttgtaagcgaaacgaaagaaaaaatgacgcagatcaaccgtctgtttgatgacatcgtccaaagcatgaaaacgagcaaagaccagacaggcaaaatcgacgttgatttgcaggcctttctcggcggccttcaagaagtcagccgcgccgtttcccacgttgcatcatccgttgattcacttgttatccttacagaagaataaagataaaccgaccggcctttttcataaagggccggtctttttaatgttaacttaaaatataatagagttgacatatataaagactcgctttattgtataaacatattttgataagctggaggaatacataatgaaattgacagaaatgatgcatattgccgtgtttaccgccattatgggacttttggggctgcttccgccgcttttcttatcctttacgccggttccgattacgctccagacgatcggtgtgctcttatcaggaagcatccttaaaccgaaagcggcatttttaagccaattgctttttttgctgattgtggcatgcggagcgcctctcctttcaggcggaagaggcgggttcggggtttttttcgggccgagcgccggatatctcatcgcatatccgctggcggcattactgctgagcctcagcatccaaggccttcgctcagctgctgtcccccatttgtttatcagacagttcttgttcggcgtgctgtttttgtatgtcatcggcattcccgttcaggcttttataatgcacattgatatcttgactgccgtaaagctcagcctcatctatgtgcccggagatctgcttaaagcggccgcagcctcattcgcagccgtaagaatcagaaaaactcttcaagcaagccggcttttgccgacgaaaggaagctgattttagtcatcatgattacatcatcatattcagatacagccggacaagcgccggaacggatcgcaattcagacagacacagaacagatcacctatcaaacttggaacaggctagtaaaccaaaccgcaaactggcttggcagcctttcagataagccggaaaacattgcaatattactgccgaacggcatcccatttttacaacttttcgcaggggcggcgcatgccggctgcacggcggttccgttagatccccgctcggctgcggcggaactcgcggaccagctgcacatcagcaaaaccgacctcgtcatctgtgaccgccggctgagcggcagactggacggcatcaaaacgcctgtcatcctgtgggatgaatgcgggcctttgatcgaggcggaaaaaacggaaggcacttttatcaaaaacaccggcctgcccttttataccggattcacctcgggatcgaccggtaagccgaaagccttcacccgctctcaccgttcgtggctggagagcttttcttgtacgaaacgtgaattcggcatttcccctgatgacaaagtgctggtaccgggcacgcttcgctcgtcacactttttatacggcgccgtcagcactttgtttatcggcggaaccgtcctccttcaaagaaaattcaatccggccggaatgaaagaccggctcagacaagctgacgttctatataccgttccgacaatgacggacgccctgctctcactagaggcgtttccggatacaccgctcaaggtgatttcttccggtgcagactggcccgcttcgtctaaacaagcgctgtcagagcgctatccccatttacggttgtacgatttttacggaacgtctgagctgagtttcgtggcgttcttatcgcctgaagacagcgcccggaagcctgacgcggcgggccgtccgtttgaaaatgttacaatcgaaatccgccggcccggcggggaacgctgcatgccgggcgaaacggggaagatttttgtgaacagcccgatgaaattttccggatacatcaacggcgcaaaacctgatgattccggctggatgacggttgatgacatgggatatatcgatcgtgaaggctatctttatatcgaaggacgtgaaaacgggatgatcgtatcaggcggcctgaatgtattcccggaagagatagaacgtgtgctcaaccgctgtccgggcgtcagaaaagcggccgtcatcggcattcctgatgattattggggcagcatcgccgttgcggtgatcgacggacatgcaaatgtaaaggaactgaagaaacagtgccgcgagcagctggcggcatataaaatcccgaaaaaatggctgttttcagaaataccggaaacagccggcggaaagatcgcccgtgccgccgtacaaaagcaggcaaaggacatgatggaatggaagctgtaattacggatgcgaagcggacgattttcgcccgggaaaacggcctgttaaaagactgtctccccgaagatttggcagctccgctgatccgacatttgagccggaacatgcccgaagacattgatgaagtcctgatcggaaacgcgacgggccgcggcgggaacctcgcccggctgtcagccttggccgccgggcttcctttgagcgtgtccggtacgaccatcgacaggcagtgcggttccggattggacgccgtgagggtcgcgtgccactttgttaaagccggcgcggggagcacatacatcgcgggaggagcggagagcagcagccgttcccctttctcatcccgggcgcgcttttctcctgaacacatcggcgatcctgatatgggcatagcggccgagtatacggcacaggcttacggcgtaacgagaaagatgcaggatgaatatgcccttctcagctatgaacggagcgtcaaagcgcacgaagacggcttgtaccgccgggaaattctcccctgtcacggattcgccgctgacgaaaacatgctgaaaaagcggaacatggggcctctcatcgcccgcgccaaacccgtctttcagtccggaggctctgtcaccgcggccaacagctgcggaatttctgacggggcggcggcagtttgtgtgatggaagaacaaaaagcgcggtctctcggtttaaagccgggattgcgttttatcggaagcgcggtaagcggcgtccatccgcattatccgtcagcagctccggtttatgccgtcaaaaagcttttgaaggaacgggacctgtcaccggatgatattgatatatacgaaatcaacgaggcgtttgccgtcaaaatatgcgttttttcacagcagcttcaagtgccgtattctaaaataaatgtccggggcggcgctctggccgtcgggcatccgtacggggcttccggagcggcgcttatcacccggcttttttatgaagcaaaaagacgcccggatgcccgctacgcagcagcagcgatcggcagcggaggcggagtcggactggcgcttctctttgaagtgttaacgtaacggcagtataatagatgatatcgataaaaaatgatcggagtggagactttatgactgccgtttgtttagtaagacatggagagactgattggaatgcccaaaagaagcttcaaggcaaatcggatattccgttaaatgcgacgggagagcgtcaggcgaaagaaacaggagagtacttaaaggggtccgaatgggatgtcatcgtctcgagcccgatgaaacgggccagaaaaacagctgacattattaacgggtttttgaatcttcccattgtcgtcatggaagatttcagagaacggagctacggtgatgcggaaggaatgtctttgccggaacggtcgaagcgctacccggataaaaactacccgaacatggagaccgcagaagagctgacagacagaatgcttgccggtttagtgaaagttcaggagcggtttcctgatcaaaaagtactgatcgtcgctcacggcgcagctattcacgccctcttgtccgctatttctgacggtgataccggcatacaaaacgcaaagcttgtcaatgcgtgcctgagcaatatcgaacgaattgaaaataagtggcgcgtcaaagattacaatgtaagcagccacctatcagaatcataacaaaaaggcccgaattagttttgggcctttttggcgagcatttttttctgaagatcatgtaatacggcgtccgcaccgtcaatgctccggcgctccgtccataccgccctgtccgcgcggtaaacgtgtccgttttttacggcagtcagctgtttccagaggtgatttttttcgagttcttcctcaccgtccaatagtacgatgtaatcaggatcgatatgcaaaagctgcccgggcctcattttgatagcgtctgatttcccgccggaatccgtctggaccgcatatgtaaaccctgcgagcgtcaaaagccgggatgtgaaaaaccggtcatcctttacggaaatgctgccatttgcagcgtcaattaataaaatcgtgccgccttctgcatccagctttcttttgatgtcattcagcttttcttcctgagccgacaattgtttctctatgatgccctctttaccgaccgccttttcaatggtaagggcagcatcaaccgcatcctgataatccgcagcttcatttttcaaagcgattgtcggagcgatctttgtcagctcatggtatatccccctgtgcaggcttgagtctgcaatgatgagatcgggttttaacgaagtgatttttttcaaatcgggatgtgacgggggcccgacggacggactgccgtcgtttcgctctttccggttatccgccgcggccgccggctttataccgagatcatggagggtgtcaataaagccctcattcaatacggcgatgcgctgcgggtgcgcagccacatgcgccgtccccagatcatgcctgacggcggtttcatgttcctgttctgagcatgccgttatgaagagaacggataagatcatcagcatactgaaaattggtttcatctgttccccctctttcgtttttccgcaattatatcattgacaatataagtatcaatgatattcattatcattatttttataaaatggtttcacagcttttctccctcaagaaagtcaaagactgattcatgccggccgctttatttcattccgctttcgtttccatcagacttctgcattcaacaaaaggtgacatttatcctgtttttgcctcagcttccaaaaatggaatcaaaccgttcgacccagtaaacaagagagcgattgcggctgtgtacaaatactcatgtccttccatcggttttttccattaaaatttaaatatttcgggttcctattaaacgaaagagagatgatatacctaaatagaaataaaacaaactgaaaaaaattgggtctactaaaatattattccatactatacaattaatccacagaataatctgtctattggttattctgcaaatgaaaaaaggagtggataaagagtgagaggcaaaaaggtatggatcagtttgctgtttgctttagcgttaatctttacgatggcgttcggcagcacgacttctgcccaggctgcagggaaatcaaacggggaaaagaaatatattgtcggatttaagcagacaatgagcacgatgagcgccgccaagaaaaaagatgtcatttctgaaaaaggcgggaaagtggaaaagcaattcaaatatgtagacgcagcttcagctacattaaatgaaaaagctgtaaaagagctgaaaaaagaccctagcgtcgcttacgttgaagaagatcacgttgcacaggcgtacgcgcagtccgtgccttacggcgtatcacagattaaagcccctgcactgcactctcaaggcttcaccggatcaaatgttaaagtagcggttatcgacagcggtatcgattcttctcatcctgatttaaaggtagcaggcggagccagcatggttccttctgaaacaaatcctttccaagataacaactctcacggaactcacgttgccggtacagttgcagctcttaataactcagtcggtgtattaggcgttgcgccaagcgcatctctttacgctgtaaaagttctcggcgctgacggttccggccagtacagctggatcattaacggaattgagtgggcgatcgcaaacaatatggacgttattaacatgagcctcggcggaccttctggttctgcagcgttaaaagcggcagttgacaaagccgttgcttccggcgtcgtagtggttgcggcagccggtaacgaaggcacttccggcggctcaagcacagtgggctaccctggtaaatacccttctgtcattgcggtaggcgctgttaacagcagcaaccaaagagcatctttctcaagcgtaggttctgagcttgatgtcatggcaccaggcgtctctatccaaagcacgcttcctggaaacaaatacggagcgtacaatggtacgtcaatggcatctccgcacgttgccggagcggctgctttgattctttctaagcacccgaactggacaaacactcaagtccgcagcagtttagaaaacaccactacaaaacttggtgatgctttctactatggaaaagggctgatcaacgtacaggcggcagctcagtaaaacataaaaaaccggcgtcggccatggccccgccggtttttttattatttttcttcctccgcatgttcaatccgctccatgatcgacgggtggctccctctgaaaattttgacgagaaacggcgggttgacccggctcagtcccgtatcggccaagtcctgaaacgtctcaatcgccgcttcccggtttccggtcagctcgatgccgtaacggtcggcggcgttttcctgataccgggagacggcgttcgtaatcggatcagaagcaaaactgagaacggatatgagcagcaataacagcgggagggcggccagatcttcaggcccctttatatgaagcattcggccgaagaatttggacagccgcttataaagcttgtcaatgatataaaacccggctaatgacagcagcagatacccggccagtccgatgtacacgtgcttcatcacatagtgccccatctcatgccccataatgaacaaaatttcccgatccttcagtttgttaagcgtcgtatcccacaaaacgatccgcttattcgaaccgatgcccgtcacatacgcattcagcgcattcgttttctccgacatatttacttcatacacatggctggccggaatgtcggccttgtcggcaagcgacaaaattttgctttccagctccttgtctttcagcggatagaaatcattgtataaaggatcaatcacgaccggctgcaggaaaaacaaaaacagggtaaacggcacagtaagacaccaagcgtaaaaccaccatttttttgtatgctttgtgatcagccagtaaaacacaagcacacacacggcaaacagcggaaaactgatccagaaatcaatgacatggtctcttatccagcttgctgctgtctgcgtcgaaatatgatacgcaagcgaaacccgatatccgatccactcaagcggaagcgaagccgccgtaacgatgagtgaaatcacaaatacgaagcttacgatttgcagcacccgaaagcgcaccgctgcttccagccaatgctttattttttttgcaagccccgtaatgagcagcagaaaaaataaaaaccaatctaacggcgctccgatgaaaaataaaaaatcctttacatttgaaaagttttcagcggctgccaggcggcccgggtccatgaacgaggacggatcggctttcgttccctttacggcctccgggacggcggagtctcctgtcataaagaaataccaatagaaaaaaaggccgtacagcacataggcaagtcccgctgccgctatccatttgcgcatggaagtctccctccttagccttatgacttactcctattgtaagcataaatgcaaataaatagaaccaagcctccgaaacggatgttaatcttttcacaacagaaaagaatggaacaacaggaagcgggaaagactaaaagacggagtgatgaatatgaaaaaaataatcgcgtttattgtagtaatcgcccttttggttattgctttcttctatgtatacagccggaccggcgatgtgtttccatcaagcaacgcagatctgattattctgtcagagaacggaaaaaaagaaatcaaaattaaagacaggcagaatgtaaaagatatgctcgatatcttgaaccaaggaaaacaagtcaaactgaccaaaagcgtgtctcccgattacgacggaacggtcaaataccatgaagaccgttttgattcattcagtatgtggctcgaaagcggcaattatatgatgtacaagcataaaaacacgtattacaaactgacccggcatgatacgaagcttgtgcaaagcatcattaaggaagaatcgcacagctgaccggatcagcatgtaaaagcgaagcccccggcttcgcttttcgtccgtcatttcggaagcatgtcccggaccgcccttctcagcagcttcccggtcgcgttcttcggaatctcatcaagaaaaaccacttccgccggccgcttatattttgccaaatgtgtttcacagtaatcgaaaaccgcctgctctgtcagctcaccgtccgcaggcactatataagcatgcaccgcttcccccgttttggcgtcaggaacgccgatgaccacggcttctttaatgccctcatggctgtagagcacttcttctacttcgcgcggatagacattgtatccgccgacgagaatcatatctttttttctgtcgacgatataaaaataaccgtcttcgtcgcgcttcgccaaatcacccgtgtacagccagccgtctttcagcgcgtgctccgtctcctcgggcatcttgtaatagcctttcatcacattcggccctttcacgatcaattctcccacttgatggtcgggcaattcgcgtccgagcgtatcgacgactttattttcgacatgtaaaatattcgtcccgatcgagccgggctttctcccccggtcaaacggattaaaacaagtaaccggagacgcttcagaaagtccgtatccctccagaatggtgacgtcaaaggtttgttcaaacgtctgcaacagagcgaccggcatggaggccccgcctgaaatgcacagtctgacggacgcaaaatcctccgccttgccgtgctcgtattgatacagatagttatacatcgtcggaacgccggcaaaaatggttgcctgacggcttttaatcagtttaaacacagaagccgggctgaattgcggctcgattaagacacacgctccgctcatcagaggcgcattcatacaaacggttaaacaaaaaacgtgaaacatcggcaatgccgccacaattttgtctttctcattcattcctaagtatccggcgacatcatttgcattggagaaaagattctgatgggtgagcatggcgcctttcggttttccggtcgtccctgaggtgtataaaatgacggcagtatcgtctttggacaatgtcggataagttctgctgcgctccgccgggcggagcatttttgtaaacgttgtcatttttaagcgcaattgagggtcttctgtcgatggagcgttctctgctgtctggctgataatgatatgctccagcagcggcagcgagccgtgcaggctttcaaatacgggaattaataggtcgatgccggcgatcgctttgacatcgccgtttttcagcatgtatgcgatttctgaaggtgtgtatgccggattaacaggtatgacgacaattcccgcttttaacgcgccgaaaaacgcaataacaaaatcaggcgtatttccgagcagcagcgcgagatgatccccttttttcagtcccctgtcctccaagccgtttgcaaatgctttgattttacctgccagctcctcatacgtcatgtactgatcttgaaacagacaagctggtttttccggtttctgcgatgccgtttcttccaatttggaaaccagattcattttcccacccctttaaaaatataatgaatgaatagtcattcatttatccggaataaacgttcacttttattatagaaaaatatagaaaaacactcaagggcaaaaagccccgagtgccgtaaaaccggaaactataattgtttcagcgcttcactgaccggcgtgccgcccgctgtcagatcgaacgctttttcatacgtattcggttcatcaagggatgcgataacggtcttggcgacatcgtctcttgaaatggagcctctttctaaatcggctgcggctttgatatttcccgtgccgggatcatttaataacccgcccggccggataatcgtatacgtcagaccgctcgcttcaagaattttatccgcataatgctttgcggcataatacggcttcagcgcttcattccaattgtcgcggttatgagcctgaagggcgcttaccataatgaaccgcttgatgccggccttctttgccgcttctatcgctttcgccgctccgtcaagatcaatcagaagcgtcttatcgtatccggtgcttcctcctgatccggcggtaaacacaatcgcgtcacagccttcagcggctttcgcgatgtcttccgtgcttccttccaaatctgcaagaacggcttctgttcccgcggcttgaagcgcttctttctgctcttctttccggaccatcgcccgcagcgtatgcgtgccgtctttttgaaacagcccggtcagacgctgtccgatctgcccgtttgctccgatgagaaatactttcatcatgatccctccccattcattatggttctatcatttcacaaaaacgggcgcagattcaaatcatgcgttcggcaaatgttctaataaatcagctcgaggaaatcttccagctctattttgccgaaatactgtttcagatcgattccggccagcgcctccctgatagcggttctgtcatactgttttccggtcagcgcctgttcgacttcactcacatctttcgcaccgaagaaatcaccgaaaattttgcagtcctgaatgattccttttttcacttcaagacgcagatcaatcgatccgaccggataacgtttcgaatgctgaaggttgaatgcgggcgaccttccgaaattccagtcccagttttgatagcgctcttcggaaatcttccggatcgctttccagtcttcatcggtcagtttatattccggcacttcggaaagatcatttgtattaaaaatatggtgaagcagatgttttttgaattcgtccgccgtcattttgtcatcaagaaactcgctgatgttggcgacacggcttctgattgacttaatgccttttgattcaattttgtcttttttcacttttaaggctgacacgacatgatcaatggcggaatccagcattaatgttccgtggctgaaaatacgccctttcgtcgaaaattgagcgttgccggaaatttttctgccgtccgcgacgatgtcgtttcggccgcttaattcagcttccacaccgagctggcgcagcgcctgaataacgggttcggtgaattttttaaaattgtggaagctgtcgccgtcatccttggtgataaaactgaaattcagattcccgaggtcatggtaaaccgcgccgcctcctgacagcctgcggacgacgatgattccgttatcttctacgtatttcgtattgatttcttctattgtgttttggttcttcccgatgataatcgacggctgattgacataaaacagcaggtatgtctgttcagggtcgagatgcttcacgcaatattcctcgattgcgaggttgatcctcgggtcggttatgttttggttgtcgataaataacatggtgctcctcctttatttctcccacttcaatccggaagcggcgattgtcacttcgcccccgaacacggattccgcttcttctttcagcttccggtgctcgccgaaatgaggcagatgtgtgagaatcagctcccccgctccggcctcctccgcgatacgtccggcttccaaactgttcatatggccggctgacgtgccgtcctggtccgcgtaaaaattgcactcgcagatcagcagatcggcattttccgcaaacgggataaacgcgtcctggtagcttgaatcagccgtatacacaacagaagctgaaccgtcagtaatccgcatcgcataacaagtgaccggatgcaccgttttcaggaaggtaatggtgaacggcccggcagaaagcgggcggtccggctgataggccactcctttcgtatgcgttttatatgtaagacgctcaaactgttctatatcagcatcatgcccgtaaatcggcagtgcatgcgtcccttttccgagaaaggagccgacctgtttggcaaattgaagcggcccgatatcagcgatgtgatcatggtgataatgggacaaaatgacggcatcaagctcttctgccggaacataggcaaacagctttgataatacggcgcttccgcaatcgacgagcagagaatagccgccggactgaaacagatagcctgaagttgcttcgtttgcggccggaaacccgccgcagcatccaataactgtaactttcatatgaccctccgaatgtttatgataaaaagatcctttcctccaatatacctatttttcgtacaaattgcatgttttaaacattgtgccaaaacagccgttgattttccaaaactgttataatacaatgtagagacaaaacaatgaaagagggatgggtatgttggaaaagatgtcggattttttcagaaatttacccggtaagaaatgcgaagaatgcggaaatgagattgttgagcagtatgagtgtcacattaatctgtgcaatgactgcttgaaaattaaggatatgtgacaatagggcgccgcacaattctaagttgtgcggcgcccgttttttcggccgtcatcatactttctgaatagggcgttattcaccattattagcaattatctgtacgttttaaaagattcagtattttcaatctatatttttctatagacggattgttttcttttctattataatttgttctaatagctatctttttagatacttattgcacttttttcttcgggaggtaatctatgaaaaaattacgctttggactagcgacgcaaattttcgtcggactcatactaggggttgtagtcggtgtcatctggtacggcaatcccgccattccaacatatttacagcctatcggcgatttgtttttacgcttaatcaaaatgatagtgattccaattgtcgtctccagcttaatcatcggcgttgccggcgcgggaagcggaaaacaagtcggaaaattaggcttcaaaacgattttgtattttgagatcattaccacttttgccattattctcgggctggctttggcgaatctgtttcatccgggaacaggcgttaatatacatgaagctcaaaagacagatatcagtcaatatgttgaaacagaaaaagaacaaaataacaaatctatcgcagacacattcctgcatatcgtaccgacaaacttcttccaatcattagccgaaggagatctgcttgccatcatctgctttaccgtgctgtttgcactcggcatctcggcaatcggtgaaaaaggaaagcctgtcttggccttctttgaaggtgtttctcatgcgatgttccatgttgtgaacctcgtcatgaaagttgcgccgtttggtgtttttgcgttgattggtgttaccgtttccaaatttgggctcagttccctgctttcactcggtaaactggtcggtttagtgtatgtagctttggctttctttctcattgttgtattcggaatcgtcggaaagcttgccggagtaaacattttcaaattcctcgcctatatgaaggatgaaattttattagcgttcagtacgtcaagctccgaaaccgtactcccccgcgttatggaaaaaatggagaagatcggctgtccgaaaggtattgtttcctttgttgtgccgatcggatatacctttaacttagacggatctgtgctgtaccaatctatcgccgctttattcctcgctcaggtataccacattgacttgtccatttggcagcagattacccttgtgcttgtcttgatggtcacttccaaaggaatggctgccgtgcccgggacttctttcgtcgtcctgcttgcgacattaggcgcattcaacattcctgcagaaggccttgcattcatcgccggtgttgaccggattatggacatggcccgcacggtcgtcaatctgaccggaaacgcgctggcatccgttgtgatgtcaaaatgggaaggccagtatgatcccgttaaaggcgcgaaggtcatgagcctcgccaaaacagaacaaaacacaaccatttcaggttaaaatgaaaaccctgcacggaatgatttccgcgcagggttttttatgccatcggcgatagaacgtaccggtgcaaaagcttcgccgtattaagaagcgataattcatgcgtgcgttcaaaagcgtgtgaagcgtcaattcccgggccgatcagcccgtgaacgatgtcatggcccgaacggatggctgctgaggcatcagaaccgtaatacggataaatatcaagctgataatcaatgccatagcgctccgcaagcccggccagatgttttctgagctgataatggtacggtccgctcgcatccttcacgcaaatggagacggtatattcatccgtagactggccgtcgccgatcgctcccatatcaacagccaagtattcgacggtctcaggaggaatgttggaattgccgccgtagccgatttcttcattattagaaatcagaaaatgcgtcgtatacggaagttcgattttctcttccgtgatgcggcggattaaattcaagagcagagccacgctcgctttgtcatcaagatgccgggacttaataaagccgctcggcgtaatctgcacgcgcgggtcaaatgagatgaaatcgccgaccctgatgccgagatcggacgtctcttccttcgtccggacaggctcatcaaggcggacttccatattctcctgattccgctctgccttgccggcgtccttgtagacgtgcactgaagtctgatgcattaagatggtgcctgtataggttttgccggaagaagtttggatctcgcaatattccccttcaatcgagtgatatcggaagccgccgatcaagtcaatcttcagccggccgtccgactttatttcctttaccatcgcgccgagcgtatcgacatgcgccgtcagcaatctgtgtttcttgtcatcacggccgggaattgtgacaaaaagaccgcctttgcggtttctgtaagaggagacgccccattcttttaaaagactttctgtataggcgacaacctcgtatgtattgcccgtcggactcggaatcgacaccagttctttaatcagttccatcgtatgtttcatattttccacaggtcattcctcctatcaattttattcttcttaaaatatactcttttgatccataacccgtccaatcttttcctgctcttttttcatagaatgaagggagcatgagcataggagggaaatgtatgatcagccgtaaaccgcacaagcggaaaaggtttcataatgattggtttgaggattggtttgaggatgattggtctggtgcagccttctggtgctgtaaaaaagaaaaagatcactgtaaaaagaaaaaagaagacccttgtaaaaagaagaaagacaaaaagaagaaagacaaaaagaagcatcatcattcatgccgccgctgctgccgtcattggtaatcgttcacacaagcccgttttacaaataaaattctcatgctccccaaacagcggatgctgcttgggtttttttattaaaattagtaccaagtaataatatcaggtgttataatctgatataaaggagtgattttttcatgtcaaaatctaaaattacagcaatcggtacatatgctccggcacgccgattaacaaacgcggatttagagcgcatcgtcgatacatctgatgaatggatcgtccagcgcaccggtatgaaggaaagacgcattgccggcgaacatgaattcacatcggatttgtgtgtggaagcggtgaaaaaccttgcagaacgatacagcggaactcttgatgatgtcgatatgattcttgtcgccacaacgacggcggactatgcgtttccaagcaccgcggcacgcgtgcaggcttacttcggctggccgcacacgggagcgcttgatattaacgccacatgcgccggactcacttacggccttcagctcgcagacgcattaattaccgccggttcccatcaaaaagtgattgtcattgccggtgaaacattatcaaaggtaacggattatactgaccggacgacctgcgttcttttcggagatgctgcaggcgccctattggtggaacgcgacgaatcagcgccgggctttttggcagccgtgcaaggaacagcgggaggaagcgcggacgtgctgtatcgcacgggactgagcgcagaattaaacggcgagccgcttaaaggcggaggaaatatggtgcaaaacgggcgcgaagtatataaatgggcggccagaaccgtgcctgaggaatgcaatgcccttttagaaaaagccggcttttcaaaagacgatctggattggttcgttcctcacagcgccaacatgcggatgatcgaatccatctgtgaaaaactgcccttcccgcttgaacggacattgacaagcgttgaatattacggcaacacttcatcggtttctattattctcgctttggatgaagctgtgaaagcaaaaaaactgtcggaaggccagacgctggtattgttcggattcggcggcggattgacgtataccggacttttggtgagatggggattttaatcgaaatcaaaaaaaagaggccctgagcatctgctcagcgcctctttttcttatgctgttatttcttcttccgttttgtgttcttttttgctttgcaccgtaaaatacacgatggtcagcgcgatcatgacaacggcgatgcccaacagaatggatgcctgctgccacatatagccgtaatcgccatttgaaatgacggcacggaacccgttgatgctgtaagtcatcggcagtgccccgtgaatcacttgatagaatcccggcaggagttcaagcgggaaggttcctccgcttgccccaagctggagcaccagaatgatgacagcgataaagcgtcccggatttcccatcgttgtcgccaataattgaatcatcgacaggaacgcgatgctggtaatcatcgtaaagagatagaatctccaagtgctttccacatcaagcccgattccttttaacagaaccgtggcgactataacggattgaatcagtccgacgagcagaatgacgctgaatttgctgaggaaccattcaaaaccgtttctcggacgccctgaagcttcactcagagggaatacgaccgtcagcatcaatccgccgacatacaagcccatagagagaatataaggcgtcagtccggtaccgtagttaggcacggaatgaatcgcgttatcgtccgtttttaccggatcggcaaacatgctgtacgttttgtcatctgtcttaatgtccccggtttgatcagccgcatctttcagctggctggacaattgtccggtgccgtctaaaagcttgcttaaaccggtgccgagagacgcttgaccctgctcaattttggacgagccgtcatggattttgttttgcgcgtccagcagtttcgttaagccgccagacacctggccgctccctgacactaacgcttctgatcctgatttgagctgtccgaacttgctgttgtattcgccgataccggccgtcaatttgttttggctttcaaagacggtctgcgctccgctgtacaatttatcagttccagccgtcagctggttaatcgcgtcttgtaccgccgccgcgccgttatacagtttcgatgtggactgaggcagtgctttcagctgatcagccttcgcttttacatctgccagcgcgctttttatgactgacatatccggaagctggatatctccgccggacggaagctggctgacgatattgtctaaatccggaaggtcggccttcggaagcttctcattcagaagctgaacaagtttcgctttttgctcatccgttaagaaatcactgtccttaatcacctttttgaccgcgtcatcccgggcatccaggctgtttttcagatcagaaagctttttcttaaactgctgcaattccttttcagtctgctcaagctccccaaccgctttttcaatatctgagaggttgactgaattgatcgcatcttcaaatgccgccgctttttgcgacacttcctgcgccttgctgtttaacgcgcttaatccattcgttaaatccggaagcttttgctggagctgcttttgtgcgtcaaggctcgttttcagcccgctggccacttggcctcctcctgaagcaatctgccctgatttatcttgaatttcggcgcttgcgctctgaagttttgcgatagagctgtcaagcgtttgaattccgcttgtcactttcgccgctccgtctgcaagctgctgcgttttatcgccgatggtggcggtgctttcagtaagcttcgctaaattttccttcagcttggcgctgccgtctttcgcgtttttcgtgccgtcgtctattttcttggcgccgctgctggctttgccgagtcctttggcaatatctttaaaattgtcaaaaatgacttttgcgtattgctccgtcacttctttcgacacggaggctttcagcttgtcgatcgccttttcgccgattgtcgcgccgacatagtttgatccggcattcgtatgatatttcagatccagcttcttcggatttttatccattaccgtgctggcgtttttagaaaaatcttcaggaatctcgaccaataaataatatttagcatttaataagtcctttaacgattgatcaagatcgtttgaaaaatgccaatcaaaattatcatttttctttaactctttcacaagatcgtcaccgatctgaagatgtttcccttcgtagtccgcccctttatcctggttgacaacgacaaccggcagctgatccaccgtgccgtacgggtcccagtacgccttcaaaaacactccgctgtagatcagcggaacgaataatatggcaatgatggggattaacagtttcttgttcgttacaatgtctttccactggctttttattgtattcaaccctgttgcctccttccgcaaactgactcatttgacaaaacggtcacggcacctaaaaagtgaaggatcatctattatttagataatccttgaccaacatacatttccagcaattcggcgatcgtctctttttcaagaggcggatggtttttttcccagtcaaatatcagcgcgatgtagagcttgagcatcacaaaagcggtcagttccggatcacacggtttaatgcttccgttttcaatggctgtttctatcttttctttaatgtatgacagaatggcccgctccattttcgcaatgacatcctgaacggctattgtaccaatctcggcgttctcctgaaaaattttaatagtcagctggtgtgtttttctgaattccaaaatcgcgacaagcgcccggtgaacattttcgtgaaatgaaagctccggtttcatcgcttcgtctgcgtgttccttcatttctcttaaaatagtggtgaaaatatcatcaaacagttcttctttgtttttgaaaaacgtgtagatggttcccttccccacatttgcaagctttgccaccagatccattgtcgttgctttgtagccgaattgtgtaaaagacttcgttgccgcttccagaatgagctttttccgatcgacggacatgtttcccacctcgttaaattgaccgtttgaacgttttagtcattttgtacataagataacttatcacagtcgcaaagaagattcaaatgttttttctctttattggtgttccctttacagaacgggaacatgcaaaaaacctccgttttacgataacggaggctggtacgtttcaaataaataagcgagtgaatcatatacggcggcttttccctggtcgatacagtcggggatgcccaccccttcgaaagacgcgcccgtcgcgtatacgcccggataggaagctttcagcgcatctctgaactctttgatgcgctccttatggccgacatggtattgcggcatgctttcgttccagcgggtcacacaggtcatttccggttcgccatttattttcattacttttttcaaatcttccattacgattttaatgatctcgttatctgaaagatctacgatggattcatctccggcctttccgacgtacgccctgagaagtgttttgccctccggcgccgcgtgcggccattttttattcgtccatgtgcaggccgtgatggagaaatcgctgtttcttgagataacgaatcccgtaccttcatgctccattttgacggctccctcaggaaaacctaaggcgacgttggcaacggacgtagaatgcatatctttgagacatgaaaccgccggcagatcagaaagcattttcgccgcggctttatgcggggctgtcactatgcatccttccgcatagagcactttgccattatcaagcgtcacggaatatcctttctcctcgcggccgatatgggtgactttcgttcctttcatcacctttgtcagcgtaagctgcttttccagctcctccaccaacgtttgaagtcctgtcgtcaccgttaaaaactggccctgctttttggccgtcagctgctgtcccgaaggctgcggacgtgattttttcataccgagaatcaggcttctgtgcttttgctcagtctgatagaattgcggaaacgtggacatgaggctcagcttatcaatatctccggcataaatccctgataatagcggttctattaaattctcaacgacttcgtcaccgacgcgtctgcggaaaaattcacccagagactgatcttccttcggtttgctcgcaggcaggacaaagtcaagcgccgcccgcgcttttccgggtacagaaaataaaccggtggagatgaacggagcgattttggtcggaatgcccatcaccgcgcccttcggcatcggatgaagcgtctcattgacgagcacgtaagactggccggtcgcattgttgacgagcagatgctcaagccccaaatccttaacgagctgcggcgcgctttttttcctttctaaaaaagaatccggcccccgctcaatgatgtagccgtctttatgcgccgtctgaattttgccgcccgctctcgggcccgcttcgatcagggtgacctcaagcggcagctgtttttccttgatttctttttccatgtagaaggcggcggctagtcccgttatgccgccgccgatgatgaccagatgttttttatcgccactcatttttatcgccttctttaccgtttaattctacttgtccagctctttcagcacgaccgctgcaagcgcgtcgataaattcaggctgtgcgttcggcatggccggacgatagtagcttgcgccgacttcttcggtcacagctttgcattcataatcattatcgtaaagcacctctaaatgatcggcaacgaagcctgcgggcacgtatacaaatgctttataaggatgcttttgatacagctcgcgcgtgagatcctgcacatccggcccgagccacggatcaggggtgttcccttcgctttgccagccgactgcgtaatcggtaattccggcgccttcggcaatcagttttgcggattcctccagctggtcaggatacggatcgccgtattctttaattttttcaggaaggctgtgcgctgagacgatcagcatcgcgtcatcccgttcttctttcggcattgattcatacgttttcttcacctggccgacccaataatcaacgaatttcggttcatcataccagctttcaacagacttgatggtcaagccgccgagcttctccgcttcttctttcgcgcgtttgttgtatgactggacgctgaatgttgaaaaatgaggggcgagcacaaggctgacagcttctgtaaggccgtctttatgcatgtccgccaccgcgtcttcaataaacggttcaatatgttttaatccgatgtacactttgaatgttacgtcgtcctggatttcatttaaacgctgtgcgagcttctccgcctgctcctgcgtgatttttgccagcggagaaatgcctccgatcgcttcatatctgtcttttaagtcttgaagcatgtgcggctccggctttcttccgcgtctgatatgtgtataataacgttctatgtcttcttctttgtaaggcgttccgtaagccatgacgagaagtcccattttctttttgctgctcattttgttaaacacctcttttgatggtctgtctaccttgattttgacaggaaaatcttcttataaccaacgatctgctcaggaagattgttccgtttttttggccgcggaatattcatgtacaaacgccgtcagctttttcagcgttgccggattgacatcagggaatacgccgtgccctaaattgaaaataaacccgtccgttttcatgccttgatcaagtatcgctttcgcttttttctcgatgacttcccaaggcgcaagaagaagcgacggatcaagattgccctgaaccgtttttgtaatgccttgttttctggcgtcatctatgccgagtctccaatcaagaccgacgacatcaagaggaaggtcatgccaatccccggccaggtggcttgcgcctacgccgaacatgatcagcggaacttgctctgctgaaagctcccggaatattctgtccatcaccggttttataaactgccggtaatcttcgcggttcagcgcgccgacccatgaatcaaaaatctgaatggcttttgcgccggcattaatctgcgcttttacataaacgataatcatgtccgcgagcttgtccatcagcatttgccacgcttgcggcatactgtgcataaacgcttttgttttgttgtaatttttagaaggcccgccttcaatcatataactggccagcgtaaaaggcgctcccgaaaaaccgatgagcggaacattcagctgttcgtttacgagtaatcggatcgtttccagcacgtaaggaacatcctgttcgggattcagttcgccgagcttttcaatatccgcagcagagcgcaccggctgatcgatcaccgggccgattccgttttttatttcaacatccactccgatataaggaagaggcgtcataatatctttatataaaatggcagcgtccactccgtactgctcgaccgggagcctcgtcacatacgcgcacagctcgggctgatgcgtaatttcgactaagccgtacttttctttcagcttgcggtattccggctgagacctccccgcctgtctcatgtaccagacagggacgtgatttgttttttctccccgtgccgcttttaaaaacgtatcattaaacgcttctcgtttactcatctgaatttccacctttcctcctgcaaccatacgttcgtgttcttcgcccattacactataccttgttttttctgaatggtatagaattgaggcttaatgttcaaaaaatcgccgaattcatgattaagaagaaaaaagcttcggctgaacgtattccgttccctctccttcttgattcgtctgcgaattaaatggaacgactttgtatgaagcccctgaaaacagattggcgtacggtatgtcaaagctgccttttcctttcaccgaatccagaagcttgtcttttccgtctttcttctcatatattcggtaaacaacccgatcatccttttgaatatcccattttaattgaaccgtaatcagtcccatcgccttaaatgtataacgggccgacagggattttaccgcctccagctcaatcgggctgcccagttccttcacattttcaggctttttgaatgtccggccgttttcccccgcttttgtgacgatatctttaaagagtctgaccgggtattggctgccgcctttcagataatgggttttatccgttttgtcatagcccatccagacggctcctgtcagtccgggagtgtatcccgcaaaccaggcgtcctttgtcgcgccggggatgccggtaaatgtggtcgtgccggttttccccgccaggtcaccttgatagctgccttgtgaagcggttccttcttttacgacctgctgaagcattctcgtcatattccatgccgtctgtccgctgaagacgcgcgttttgccgtttttaggcccggataacgtttctccgtcttcgtccgtgatgttctctataaaaaatggcttcgtatacattccgtttgccgcaaaggtatgataagctccggcaagctgaagcggagtgacgccttcagacagaccgcccagcgcaatcgcgagtccgttgtcagaaatgttcatgccgtttttctcaagatacgattttcccatatccacgccgatctgcttcaatgtccagacagcgggcgcatttatgctgtaagtgatcgcatcctgcatcgtcacttcccccttgtactgtccgtcataatttttcggttcatacccgtcgtaggacgtcagtttgtcttggagaagcgaatacggtttgaacttgtcttcctgcatggcgggcccgtatacggcaatcggcttaaacgttgagcccggctgccgcttcgccgtaaccctgttgtatccttttgtcacgtagtcgcgcccgccgaccgccgcgcgcacgcctccggttttattatcaataaagacggcgcttccctctgccgcctgatccgtccccggaaaatagccgctttccttcatgagggtatatgccgttttctgcagcttggaatcaagtgacgtccggatcgtataaccgccttgaagcagctgttctcctgacatcgaataacggtcttccgcctccttgatgacaagatcgatataactgtcaaaccaaggcgtttctgatgttttcttgacattaagccccaatgtccggccctgggctctgacggcttccttggcgctgatatagccttgatcgttcatcattgcaagaatcgtatcgcgccgttctttatttttatccggatgctgaatcggcgaataaagagatggcgccttcggaatcgctgccagaacggctccttctgcaacggttaaatcttttacttctttattaaagtagtagtgggacgcggcttgaatgccgtaaacgccatggccgaaataaagctggttcaggtacatttcaagcagcttgtccttgctgtaatcacgctcaagattgatggcgataatgacttccttcgtcttgcgcaaaaatgttttatcatgagtcagaaaaatgtttttcgccagctgctgggtgatcgtgcttccgccctccaccttgccgcctgctaaaacatcccggaacaccgcccgtccgacagacttcacatcaatgccgtgatgttcgtaaaaccgtttatcttcaacggcgataaaggcatctctcacatcttccggaacctgctgaatggataccggctcacgattttccgtatagaggctcgcgatttcatcaccgttttgatcgacgatttttgaagatgcgtgcagtattaatttcttttcatcgatgacataatggccgagaaatataatgataatgtatccgattaacgcgagaaaagcggttgccgccgcaattacagccggaataaagaatctttttttctttttcagcataagtcacctcgcctttcttaacttgtagtatgggaaatattgtttcgaattatgtcagaatgagtcgccaatagaaacttataccactcttttgatatactagcaagcaggaggtggctgatatgaaggtttatattacatacgggacagccgattttttaaagacgattgccaagaaacacccgagtgagaatatggtgctgatgcaaggggaggataatgcggttttaattcatgaaacaaatggagaaaccgtttttcaggcgccccattcctatgaaagcatcgacagcgtcggggaaatcaaaaatccgggctacgccgtcctcaacaacatcgccgttacccaggaaggccgtccgctgtttgaaaaccggtttaaaaaccgcgccggcaaagtggaaaatgaacccggttttaaagccatccgcgtattaagaccgctcgaaggcgatacgtatgtcattttgaccctgtgggaagaggaaaaagcctttcaggattggcagcagtcaaactcttatcaggaagctcataaaaaacgcggaacatctgccggtatcgacacgacgtctattttttcccgtccgtcttatgtaaccgcttattacgcaatagactgaaaaccgccggagattctccggcttttttgatgtcccgattttacgcatccttctttgcaccttccgcccgcctatgaataccctgtagcaatcctatttataaacggagtggttcaattggggatcggcgtctactcggtacatctgctttatgttgcttttatcgcggccattatcgtttttatgcttctcagaaaagatacaacctttatttcactcgccggcatttttgtgattgcgctatggacgacgcattcattctccgcttcggtcagcagcctgtttcacagctttacgtatgccgccggagaattgctgccgacgatttttatcatttgttttatcgtggcgatgagcggccttttgaccaaaaccggtattaatgaagcgatgatttctccgtttgcaaagctgatgaaagggccggctgtcgcgtattgggttatcggctgtctgatgtttgccatctctctttttttctggccgtcacccggggtggcgctgatcggcgctgtgctgcttcccgcagcgatccgggcgggcctttctccgatcgctgcggctatggcgatgaacctgttcggccacggattcgctttatcgggggattacgtcattcaggcggccccgaaattaacggccgatgccgcgggcatcccagtgagcgatgtcatgcaggcaagtattccgctcgttttgatcatggggttaacgacgacaatcaccgctttcttcctcatcatgcgggatcgaaaaaaaacgaaggcccccctctccttggacagctccggttctttggacacaagtatgtatctgccgaaaaaactcagggtgatcctggcggttttcattccgcttgtttttctcgccgatattatctgcatgatcgtataccgcctccaaggaaacgatgcgacggcactcgtcggaggaaccgcgatcggcattctcctgatcattcatttcattgtatataaagagcggcatttagaaaagatcaccgagtattttatcggcggttttcaattcggctttaaagtattcggccccgtcattccgatcgcggccttcttttatctcggtgacgcggggtttaaaaatattttgaacaccccgctgccgaaagggtctgcgggaatcgtcaatgacctcggactggccctgtcccattcttttccgatgtccggagaattcgccggcatcgccctggccgcagtcggtgcgattaccgggctcgacgggtcagggttttccggtatatctcttgcaggctcgatggcaaagctgttttctgccgcgcttcatacggacccggccgttttaacggcgctgggccagatttcagcgatctgggtcgggggcggaacattggtcccttgggcactgattcccgctgcggctatttgtaaagttgacccgtttgagcttgccaggaaaaactttatccctgttgcggccggacttatcgtcacgaccatcgccgccatcatcattctcccgtagcaaaaagattgaaatcttctgacattttctatacaatcatgggaaaagcagacgagggggcatcgcttttgacgttaacgacacttcaaaaaagcttaaacgctcagcttgacgggctgtatgaggaaatggttgaaatcaggcgtcaccttcacatgaatcccgagccatcctttaaggagaaaaaaacaccggcgttcatcgcctcattttatgaaaagctcggcgtccccatccggacgaatgtcgggggcaacggtgtcacagcctgtattgaaggcggtgaaccgggaccggtcgtggcactcagagctgattttgacgctttgccgatacaggatgaaaaagatgtgccctatgcttcacaaattcccggcgtcatgcacgcctgcgggcatgacggccatacggcggctctgctcgcggccggaaaagtgctgtaccgcaaccgggaaaaactgaaagggtcatttgtgatgatccaccagcacgctgaggaattatctcccggcggagcaaaagcaatgattgaggacggctgcctcgaacatgtcgatgccattttcggcacacacctatgggcgactgaacccgtcggaacggtcttatgccgcccgggcccagtaatggccgccgctgacggctttacgattaaagtcatcggcaaaggcggtcacggtgcgatccctcacgatacgaaggacgccgttttaatcggctcacaaatcgtcacggctcttcagcatatcgtcagccggcgggtaaatccggtgcagccggccgtcatctcagcaggctcgttcaccgctgaaaatccgtttaatgcgattgccgatcaggcagtcatttcaggcaccgtccgctcgtttgacgaaagtgtgcgcggcctgctcgaagcagaaatagaagccgtcgtaaaaggaatctgttccatgcactccgcttcctatgaatatcgtttcaaacgcggctatcccgccgtcgtcaatcatcctgaggaagcggcgcacgcggcggcagccgcagcggaaacagacggcgttacgaaagtcgttgaaggagagccgcagatggcgggagaggatttttcctattatctgcagcatacaaaaggcgcttttttctttacgggcgccgctttagaaaatgcggaaaccgtttatcctcatcaccacccgaaatttgattttaatgaaaaagcgatgctgacggccgccaaggtgcttatcggcgccgcggtaagctacccccgctgacataaaaaaaacagccggtacattacgtaccggctgttgtaattcttaaatgaaaaacgtgccttgccgtctcaccgagctgtgacagcagtttataattggccgctccgcccacggcggctccgacgaccggcaaaagctgaaacaatttgaccacgtccagataatcgcggtattcctgctgaaaaactctccaatcgacatcatgctttttcgaatcccactgttcaatcattgagtatatgcgtttccgctgttcaccgcttgagaaagccagctgaaaaataaacagcaaaaacaatcgctcatccctgtctttcacatcatagccgtaaatggaggcaagatcgaacagacatttcattttaatggatagcagcaaaggaaaatcagccattcctaaaaaaattccgccggcccccgtaccgataccttcagctgccgcgaccttttggtacgatgcgatggtttgtctggcgagagcatctttttcagcaagcgtcataccgtttgtatcccgcttgcttttcaccagatttgaacccgccattgttgcttcggtcatttttttaatgctttctgtgatgacggcatgaattttttcgggaatccgctcatttattttcgcctgcattcctttagaaaagcgttcaagcatggaatctttgcgcaaaaaacgcgctttccattgcagtgcttcctgtaccagctgctgatcgtcggtcatctgtgtctccttctttcattgaggtttcaaaaacccgattgattacagcttgccgtactttttcaatcttccgcccatatacgatggcatgatcacaaaaatcagaacggctgaagcaacggccgcatacagcaccccgctgactcccgcggcataggctgacgctgcgcagaacagcagcgcctgcacggttaatgacgatttcatcagcgaaaagaaactttgcagcttcgctttctgattgaccgggtaaagctcctgcagagaaagatgatgaaaatgcccgaacagcggaagaagctgtattcccgtaataaagacggtaaatacggttaacgccgccgtgatccacggattggcggaaacgagcataataatcaggataaaaataatcgtgagcctgacctgaatgccgagataatcatttgaacgcagaaaggcccgcgcatacatataggagaacgttttccgctgctcaaacggaatcattctgagcaaaaagtcgagatacgcccggcgttttgcctgttttttcaggtgaggcacatcggtaaacagattggcgattctgtaaaaccgctgcttccttcttaattcatattcaatatgagcttcccattttaatgatttatgttttgcggctgatgtgaaatacacataaaggccggccatcacaatgtagacggcggcagcgtacacataaaacgactgtaagacgaagtataaaagcagcatattgcagataaagcgtatgaccgcatccatcattttcatgcttctgtcattcataaacgtcatccgccactccatggcctgattccacgcttttaccgccagcatctgaataaatacggcggcatacgacgcaagcgacgcccccggacttacagcgaaaaacagaggcatgcatacaagagacagagcaataagcggaaacagctgtgacagatagctgtacttaaatgaatgcttaaagtatgtccccattttcggttcaagcggcagcagaaacacgaggtccgcttcctttaacagcgtccggacgtatgaaccggtcagcacaaatgaaaagagcaccgccatcacccaaaaagagggaaaatgaacggggatgtctttgacccacttgctgtaccagctcgccgcgccggcaataaaaaagatcagcacaatgacgagatgatcattgagcatatatttcatatacattctggtttcctttatatgctcttcaagccgggactgccaaatagtagacatattattcatggccggcgtcttccttcgtcagttcaatatacaagtcatcaagagctgcgtctttcatgccgaactgctctctcagttcttccagtgtgccgcttgcccgcacttcgccgttatgtaaaataatgaatgcgtcacagtagcgctctgccgtagccaggatatgcgttgacatcagcacgcttgatccggcttttttcgcggcgtccatccgctccagcaatgcattgatcgcaagcgggtcaaggccgagaaacggctcgtcaatgatataaagcgagggctccgcgagaaacgcgcacatgatcatgaccttctgcttcatccctttggaaaagtgagcgggaaaccatttcagccttttttccattctgaattctttcaaaagcggaggaagccttttttcaagcgtttctttggaaaggccgtacgccatggccgtcagctccagatgctctttgagcgtcagttcttcatacagcaccggcgtttcggggatgtacgtaaattgcgagcggtagctttccttatcctccgaaaacgtcttgccgttcagctcgatcgagcctttatgcgggtccattaatccgataatatgccggatcgtcgtgcttttgcccgcgccgtttaatccgatgagtccgacaatctggttcggctcaagggtgaatgaaacattttttaagaccgggtttctcgtataaccgccggttaagtcttttaccgatagcagagacataatttctccccttctgattcgtttttcttcatagtaccaaaaataaagtctgatttgaaacgattccctttttttctcacgtgaaaagcgtgcatagttatcgttttggcggacatcataatgtatgtagaaggaaacagctttaatcaactgaaaatgaggtgtttataaaagacgtcttagaacagttggatgaaaatcaacatgtcctgtgcttacaatttcttcacacactgctttgatgatgttcttcattcatgatgaaataatcaaatgaggtgtttgtcccaggaatgattaagcagacccataagtcttcattttaaaaacaaatgaggtgcttacaaaaggcatatttaattttctgtgataaagctcgtacttctgcatcagggtgaacgcgcagccgttcatcctgttttttgttttgaccgtttttgtggtacgatgagaatatacatatatttcttttcagggaggaaacccatctatgcacaaagcggacgattgtattttctgcaaaatcattgccggtgacattccgtcttcaaaagtatacgaaaatgaacatgttgtggcgtttcttgatatcagccaagtcacaaaaggccatacgctcgtgattccgaaaacacatatcgaaaacgtgtacgagtttacgcctgagctttctaaagaatatttcgaagcggtgccgaaagtcgcacgcgccatccgcgatgaattcgagccgatcgggctgaatattctcaataataacggtgaaaaagcgggccaatcggtgttccattttcacatgcatatcattccgcgttacggaaaaggcgacggtttcggggctgtctggaagacccacgccgaagactatacgcctgacgatcttcaggagatcgcttcaaccgtcagaaaacggcttgcctcatcttaaagatgaggtttttttgcgtccggcaacacaaaaaacataaaattatattttttcatatcaaaaaaatcaaaaaattgtgataggataattgtattatttcttacactaaagcggaaaacagggagagatcgtaaacatggaacgtacaacgaatttcaatgcaggacccgcagcccttccactggatgtgctgcaaaaagcacagaaagaatttgtcaacttcaatgacaccggcatgtccgtcatggagctgtcccaccgaagcaaagaatatgatgcggtgcatcaaaaagcaaaaagccttctgaaagaactgatggatattcccgacgattatgatattttatttcttcaaggcggcgcaagccttcaattctccatgctgccgatgaactttttaacgccggagcaaacggctcacttcatcgtaacgggcgcatggtctgaaaaagcactcgccgaggcgaaactgttcggaaacacatccgtcacggcaacaagcgcagattcaaaccacaaccatataccggaagcggacctcacaggaatcaaagacggcgcctacctgcatcttacgtccaataacacgattttcggaacgcagtggaaagagttcccgaattcaccaatcccgctcgtagccgacatgtcaagcgacatcctgagcagaaaaattgatgtcaaaacgtttgatgtcatctatggcggcgcccagaaaaacctcggtccgtccggcgtcacggtcgtcatcatgaaaaaatcatggcttgaaaacgaaaacgccaacgtccctaaaattttgaaatactccactcatacaaaagccgattcactgtataatacgccgcctacatttgcgatttatatgctgagcctcgtccttgaatggctggctgaaaacggaggtgtcgaagcggctgaacggcgcaatcatgaaaaggccgacgtcctgtacggcacaatcgacgcaagcggcggtttttacgcggggcatgccgcaaaagacagccgttctcacatgaacgtcacgttcaccctccgcgacagcagtctcacgaaaaaattcgttgaagaagcgaaagcggctaaaatgaccggactcggaggccaccgctcagtcggaggatgcagggcgtctatctacaacgccgtcagcctggctgattgtgaaaaactggctcagtttatgaaaaagttccagcaggaaaacgaataaatttcttctaacataacggttcctttgatatactgtttgcatatcaatttttccggccatcgcaataaatgacgagcatattattggatggcgaaaaagcttagcagaggagagcttagtatgaaaacaaaagaattagtcattatggccctgtttgcggcaatcggagcggtgcttcattccattatgccgccggtattattcggaatgaaacccgatatgatgcttgtgatgatgtttatgggtattctgttatttccccgtgtgcagaacgtgctgatgatcgggattgtaacgggaatcatttccgcactcacgacatcttttccgggcggacagcttccgaatatcattgaaaaaccggtaacggcgtttctgtttctcgcgctggcgcttttggtgaaaaagagcgtgaaaacagcggccgccgccgtcattacaatagccggcaccttcatctccggtttgctctttctggcgctggcccttctgattgtcggcctgccggggggattcaccgccttggtgctcgcggtcgtccttccggcggctgcgctgaatgcgatcgccattatcattatgcatccgattgtgcagacgatcttaaaacggtccaatatgattgaaacggtgaaataaccgcataccgaaacctcttccggccggaagaggttttttaatgtgtttcagcatgttttatacgagaagttttgtgaaaaagataaggaacaatgcgagggcggttcctgctgagcagacgatggccttttggcggacgacccgcttcggcggataagaagcggcctggccgagcagtttcaggtaataaacggcgcccgccgcaaagacaagagccatacaagataaaacaatcataaagacagacaaccttctccctccttttcccttaaaaaatatgctaaaataaagcaagctatgtatagaagtttattcttctgaacaaaaatgataaaagttatgagaaaaaaaacggggtgattttaaatggctgacggacgttcccttttaacaggccttttcgtaggcggattgatcggaggcgcagcggtgttactttcggctccttcatccggaaaagagctgcggggcaaaatcaaagcgaattgcaattcaattgaggacacaatcaaacggttaaaaaaagacggaatggcgcttaaagaccagcttgtccaaacggcgaaagaaagcgcagaagtcattaaagacgtaggcggagagcttcagaccagcattaaaaggtggcaggaggaaatcaagccgcaccagcaggatcttcaaaaggaaatcgctgatattgaagagaaaatcagacagctggagaaaaccttacaaaactaatatcctatacaaccaaaaaaagtgcgggcatattgcgttccgcacttttttttgcggtttaaagcctttcacagcaacggattaagaatttattataaaattcttaaattttcatctttattaatctttattttattggcataatagaggaaaagaaaatgtgaagcaggtgatctgtattgaatcgtgttgaaccgccttacgatctaaaagaagctttaatctatacccaaaaaatggcgcagctgtccaaagcactctggaaatctatcgagaaagactggcagaattggctgaagccgtacgaccttaatattaatgagcatcatatattatggattgcctatcagcttaaaggagcttctatttcagaaatcgccaaattcggcgttatgcacgtatcaactgcatttaacttttcaaaaaagcttgaagaacggggatatctgaaattttccaagcggctgaatgataaacggaacacgtacattcagttaacagaagaaggggaaaatgtattcgaaagcctgcttgaggagtttgacccgtctagaaacgcggtgtttaaaggctcacagccgatctaccacttattcgggaagtttccggaagttgaagaattaacctgtgtcatccgccacatttacggcgaagattttatggagatattcgagaaatcattgacaaacataaacaatgattttgatagtgaagacggaaggctgaagaaaaaaacagacgaatcggctgtccatgaaacggctgaagagctggaaccgatcaacagttaatcaaagtgcttcattatctcaataaattcttccatcagcgctgtataaagcccctgctcatacagagcaaaaatcgtttcatgaacatctaatttttcgttcagctgtcccgcaaaaagcgcaaggagcttgtcaaacgtcacaaagccttgcgctttttgcgactccagctcgtcctccaattcgcggcagatccgcccgacctcttctccttcttcttcggtcagccctttttcaatcatcatcgcataaaaagggtacttatccatatccaccgttttcaccagcaattgtatgtaatattctaaacgcccgatacgctgatccattgaatccatccgtttcacttctttctatctttaatcttattttagctgataatgaatggagaagaaaggttaaaccgtacatttccatgtttcaccgagctcttctgttcttccctttccggggttattttttttctttaaaaaaggattgattttttctcctgaagagagtaaattattttgagattgtattccatctttgtacggaaggatgactctgatgaattgctggaaaaccattaatctgatcaaagattatggtgcggttcgtttattattgactgctgtaggttttatgatcctgttttttatatgcaacttcttggcattcgggctgctgcgtccgaatatcagtttaagtgacgggcacgtgtttgctttttgtgttctgctcgttgttactttatttgtacataaagtcatacatgtcctgccgatgatctgtaaaaaaagaaaaaaggaaatgaaaatgtacttcttgcggatgccgacatggaaaggcataccgaaaacgacgatgctgatttctacgatcagcccgtttttattcattacgccgctattgttttatgccggactggcatttccgagacacgctcattacttttatatgatttcgagcattcatgcgggttattgcctgcctgatcttctgtttgcgctgcacctggtcaaagcgcccaaatcatgtctgattgaccaggaatccgacggttttgatattttagtaaaaaaagtgccggagtcttgatatcccgctgatttttcaggttacattctatcttttttaataaatatttggtaatgtaatatgggagcagttcagagagagggggaatctcccatcattttattctattttatcgtggctgccctgtttattctttattttataaacaggctcacaaatacattatgccttgtcagagagattcctgaagaccggcaggataaggtattccgttttattaatgtatctattttaattttactgatctcttcattcgtcgagatctcctttactgtgtaaacaggcaaaaaaatatggctgacggaggtctgacccccgacagccatatttttttcttaataaagccaagaagcgccgatgatgatcaataagatgaacagaacaaccaataatgcaaaaccgcctgcaaatacttcacccatctccaaaagcacctcctacaaaacgttttatttttccaattacatcatatgcaatttacttctgaaacgattaggcgcccgggtaagaaaacggatcgcttttagaaaaagcgatccgtttcgcttaacaaatgtaagctgcacctacgatgataagcaatatgaacagtactacgagcagtgcgaaaccgtttgaatatcctccgcccatggttcattacctccttttcatgatcaatatatttgtatgtatcaggaaaaagtttgactagacgaatgccctttatttaaaatctttttacagaaagccacaatatgttatgatacgcatatgcaatttaatttggatgattaggagtgtttaaaggaatgaagaaaatcgcgatagcagctattacggcaacgagcgtcctggctctcagcgcttgcagcagcggcgacaacgacgtgattgccaagacggatgccggaaatgtaacaaaaggcgaactctacacgaatatgaaaaaaaccgcgggcgcaagtgtgctgacacagctcgtacaagaaaaagtattagcaaaaaaatacaaagtatcggataaagaaatcgataacaagctgaaagagtacaaaacgcagctcggcgatcagtacagcgcccttaaacagcagtacggcgaagattacctgaaagatcaggtgaagtacgaactgcttgcacaaaaagcggcgaaagacaacatcaaagtgactgacgctgatacgaaagaatattacgacggcttaaaaggtaaaatccgggcgagccacattcttgtcgctgacaaaaagacagctgacgaagtggagaaaaaactgaaaaaaggcgagaagtttgaaacgcttgcgaaagaatattcaactgacaactcaaaagacaacggcggcgaccttggctggttcgataaaaagtcaatggatgaaacattcagcaaagctgcattcggtctgaaagtcggacaagtcagcgatccggtcaaaacaaaattcggttatcatatcatcaaaaagacagaggaacgcggcaaatatgatgacatgaaaaaagagttgaaagaagaagttcttaaacagaaattaaacgacaactcagctgtacaggcggcaattcaaaaagtcatgaaaaaagctgacgtaaaagtggaagacaaagacttaaaagacacgtttaacacttcaacttcttctgaatctaaataaaaaaaactgtgcgggctctcagcgagccccgcacagtttttttatgcgatggaatgattggagttttcttctgcatccgtgttttcacttgcgggcgccgccatacggcgctcgcgttcctgttccatccgttcaatatacacccttccttctttttcaataaacgactggtcaagcttttcctcttctttagctgttgtgaaaagcttataggcgctgaaaataattccgataatgcaaaggtatacccaccaaggaaaaaatagcacgtcggtttcctccctttttcacccagagtctttattctaagctatgcttgataaagacaagttatgagagctgaacgtaaaaaagaccgatcatagagaatcggcctttttatcttattgatggaacgtcggtttgtagaaagaacggttttccagcgcaaatacacgctctgtgtattcgcccggcttcacccgttccagcgctctgtccatcatgatcatttttgcatccagattgtcaatgtagtgcagaatttccgcttctttcaccatcggcggtttcgggcttccccattccgcttttccgtgatggcttaaaatcaaatgcttcagaatcagcacttcttcagcgtcaatctgaagctcttcggctgcttttgaaagctctgtcaccatgatcgaaatgtgcccgagcagattcccttccacggtgtacgtcgtggagacggggcctgaaagctcttttactttgccgagatcatgcagaatgactccggcatacagtaaatcccggtcaagagacggatacagatcggcaatcgcttttgccaggttcagcatggacactacatgatacgcgagcccggagacgaactcatggtggtttttagccgccgccgggtaatccataaactcagccgcatattttttgaccagatgtcttgtgatccgctggatatttggatttttcatttcaaaaatgtattgagtgacggtttccatcatttcatttttcggaatcggcgccgtttccagaaaatcatcaatgctgacattttcgttctcgccggccggccggatgtttctcagcttaagctggtttcgtccgcgatagtgatggacatctccgatcaccttcacgatcgtctgcgccgcgtacgttacttcatcagtcggcttggcatcccacagcttcgcttcgatatctcccgattggtcctgcagcattaacgtcaggaatggttttccgttgcttgcgattcccttagtcgaagatttaatcagaaagtattgatcgacctgctcgccgacctcgtgcagcataataccttttgccattctattaaaagctccctccatatcttacataataccagtatagcacatacctcttttttgaaaataaactcttttatgacaggagccgcatgacttgtccgctgtgaaaagaccggctgacatgctcatggcaggtgaaataaagtatctgccgcccgccttctgaaagctgattcagcacatcaaacagccgctccagccgctgcctgtcaaaatggacaaaactgtcatcaagtaaaaacggaagtgataccgcagattccctctctgacgcaagggcaaaacggatcgccgcataaagctgctcgcatgccgcctgtgacagttcgcctgctgaaaacacagttccgtctttccgcatgaccataatggaatcatccgcctcggagaaatacaatttatggtaacgtccgtccgtaagcggtccgtataatgcaccggcggtttctaacagacggggaagcgtcacttttttatgccgctccattttttccctgatgatgtgtctgaccgtctgtaatgcggcccactctttagcggtttttttcacgcgctccttctgcatttctgtctgctgttttaaatcggatacaagccccgaggactccagctgctcttgtttcaccgttaataaagcggttttctcacggagctgcgcgcttttttcctcaagcgtttttttctctgtttccttctgaacgactgtatgttcaagttcggacactgtgcggctcatatacggctcaagctgttttccgcctatgccggacaagtgcgttttgatttcgcgcagctgccgctctgtttcccggcggctttcattcagtctggcgagttcacaaaagtgttcgcgattttttgcgcctgccgccatgaaaagctgtttgacctgctgttcgtagtaatggacttcttcgtttaattcacgcatttgctcttgtgcatgcagcagatccgtttcgagcgcctgctttcgttttgcttcctcacgggcccgttccgcctgtaccagcaaaacgcgcagtctttcttttacggacagctcccttccgtctgaaggactcagctttttgacccggtcctcaaatgctctttgcaacttttgcagccggcccgcttcaatggtcagctcatgcttattaaggatttcttttttgacatctttcatcacatgatatgcgtcaagaagatgggaaggacttcctgaaaaacccagttccttcataaaaagttccgcctgtttttcagacggcgccatttccgcctcccattcttcatattggcggatgactctttcatatgccgcttctttctgttcaagcacggcttgatccgcaatcagctgctgccggtgccggccgtcacgccaaagctcttcctgcagaaggtcagccgcttctttggagatcgtcggcttctttttcttgtgaccggcccctcctctttctgacggcagcggtttttgcatgccggacagcatatacagcagcagagcgccggtaaaaagggcggcgggcagccattcctttaacatagcgaaaatcgcaatgaacagaatgcccgcaccgagaaagagctttttttgtttggcgcgctgtttttccagctgctgtacatgtgcctgccattcgtttccttctgtatcagccgtttgcttatatgattgtaaagcggcttctttttctttcctgacagcggggtccaaaatgttttccgacgtcaaggcatgttttcgttcggcttcttccagctccagccgcgcttgttcgaaaatcgcatcaagctgtgtctttctttctcttgcctgtccggcgctctgcacggcttcctgcagccgccattcatattcataatcggtgttcagtgaaagaatgccgtcttcctcatgtcttccgagctgctgcaatcctgacaaaacgcgggcagatgtctgccggatctgtgattggatggcggcaagctgttcaccgcgcgattcgtacatatgctgctcgccggaaagctcctgcagctgccgctctgtttgcagcaagtcctcatttggagcgagcagctcagcctgccgcctgagttcagcagcttttgcccgaagtccctcaagacgggcagctttcggatggagatgcgattcgtatttttcaagctgatgcatcccgtccttcgggaattgcttcaatgcatccggataagaagaaagttcgctttccaaggctgtttttttgtctgcgagcggctttgcttctatcgccgattttactgttttgatttcttcagttatgtctttcaatcgtgcttcggcatcctgcaaacggccgccggcgctttttttctcttccagaaggctgtgatagcccgcttccgcagcttccgcctgtttcagctgggcgctgagccgctttaatgtatccaactcctgatttaagcgggggttccgcccgttcggcttatacatcctttcaagttcttttgccagccgcccgtcaagctttgccgccgcttccgacccgaataagctcgaatacaggagaaactcgccgattttgtcccggttaaaagcttgaatctcctgcagtccgaatacatcgaacgaatagatcgcttcgtacagcgcccggtctgtatcggagagaagctgtttgagccattctccgtccttgatttcgcctgaagccgtatacactctgactttttcggcagcgccttttgtccgttcgattttgacggcaccgtgatcgccatgcttcaattccacagtgccgccgtaaaccccgccgtttttcggttcgtatttttttgatttcggaaaaccgaacagcacgcttttgatgaaggacatcaatgttgttttacccgcttcatttaatccgtagatcacttgcacgggagaatctgacagctgaaaactttggtcggaaaattttccgtattggtaaatatgcattgccgttattttcatcgctgaagctccttcatctggcgtcttaaaacggcttgagcctgccgcttaatatccagtatctcttcatctgtaaatgaagtgatctgacgccgatatacgggatgacgctcaagggcttcaaatacaccgctcatgtccgcgcattgttctatgtcctgaagcagccctttaaaaaacggatcgggcggcacgctgtctgtttcatccgtccgatcctcaagcgcaagcggccagacgaaacattcctcttcggcctcttcctcctgtaaagcggaaagaaactcctctgcgatgcctgcgggcgcctccgtccaaaagcggggcgccgcgccgcgaagcaccagcctgacacatgccgggcggcccgccgcgcgcaagccggagaatgtatccgatgcggctttcagaagtgaagtcatatgttcagctcctgagatatcaagatcaatttcctcccataacacatcatgcgcttctttgaattcccaagacatctcaccgtttgccgcccggacgagataatatcccttaggcccggtttcttttaaatgccgggcttgaatattcccggggtaaatagcggcgggatgctgggcggacagaacctgccgtttatgaatgtgtccgagcgcccagtaatccatgccgcttttttcaaggtcttctttcgtaaacgggcagtacgggtcatgcccttccgctcctgataacatgccgtggagcatgccgatatgataaggcgcgccggtcattttccggtaacgggccgcctgattgaccgttacgcttctttcctgatagctgcatccgtatatgcttgccgcaagctctccgtttttaaagaaagatttttcctccggtgtacccgaggtgaatatatgtacattttccggccattcaatcggcgtccacttaccgcccaaatgatcatggttgccgaatatgacgaacacttggatacccgcttcctgtaatctcgtaaactgttttctcaaaaacagctgggcttttaaacttctgttggcttcgtcaaacagatcccccgaaagcagcacgaaatctgcctgctcccggagtgccccgtccgtcagacggcggacgctgtgaaatgtgctttctttaatacgcgcatataccggttcaggcagattcgaaatgccgtaaaacgggctgtccagatgcaggtcagcggcatgaataaacgtcagatcagccatctcgccctcccctttctgcagattgaattacccttattttagcaccgtttttatacgaatgcacgttctgtaaaataaaaaaacagcccggctgttccgggctgtttcatttattttttggagatgcgcagcgcttgtttgatcgctttgaatccgctggcgtttccgtaaatcaaaacgccgcctttgtaaattttcgcgccgaccgccgcaaagatcacgatagtgaccagtgtcagggcgatcccggccgcagcctgccaaaacgggatatcgagcatcccgacgcgtaaaaacataatcatcggcgtgaaaaacggaatgtaagatgtaacggtaataaaaccggcgtcaggattgccgatgccgaacatggcgatcataaaacctgccacgaccaaaaaaaccatcggctgaatcgtctgctgtacgtcctctatccggctgacaacactgccgagaaacgcggcaagcgtcgcgtaaagaaaatagccgagcaaatagaaaatgacggcatagactatcgtcgagacgggaacatccgtaaaattgaggaatgcactgatcggcgacgacgcatcattttgagggttcagcttcagtgagagataacccgctgcaatcagcaccgcaaactgtgtgatccccacgagcgcgataccgaacagtttggcaaacatctgctgaatcggcggcatgcttgaaattaaaatttccatgacgcgggacgatttttccgtcgccacttccatcgcaatcatgcttgcgtacatgataactgagaagtagatgacaaacagcatgatgtatacaagccccattacctgaccgagctcttcctcagatttcgcccctttttccagcgcgtctttgctgacttccggcggagtgtagaggctgctgactttttctgccgaaatgccgagcttggcggtttcgacagcggttttcgtctgggttaaagcctgcttgagcagtttatacgctgattcatcagaaatggtcagcgccttgtatgctcccgttatcgttcctttttgatcctgtctgatgataaacagtccgtcccattcaccgtctttgacacgctttacggcatctttttcggactccttcgtctccattgcctgcagatcattgtctgtatccgccgctttaagctgttttgcaaacgccgggtacagcccgcccgtttcatcaatcaccgcgatttgctgcttgccgtcatccgattgaaacacggaaataatcgattgcaggttggtcaccgctaatactaataaaacggtaatggcggtcgaaataatgaatgactttgttgcgattttgtttttatatgtatgaaacagcataatccaaaatttattcatatacggcccccaccttttctataaaaatatcatgcagtgacggctcttccaattcgaacttccgtataaaacctttcccttgcagcgcccggaaaatatcctgcgaaaccggttcattcgcgacctgcagtctgattccgtcatttgtttccttccatttcacgacaccttcatgcgtttttaaaaagctgaggtcatcatctgaatgaacggtgacattttttttgccgaaagaccgcttaatgtctttcagattgccttgaacgacgggttttcccttctggagaatgcacaaattctcgcaaagttcttccacatgctccattcggtggcttgaaaaaacgatggaaacgccgctgtttttcaaagaaataaccgcttctttcagcagctcgacattcaccggatcaagaccgctgaaaggttcatcgagaatcagcagttcaggcttatgcaggacggccgaaatgaactggattttctgctggtttccttttgacagctcttcgactttcttattcttgtaatctgtaatgccgaagcgttcgagccatgtcatgagctctttttccgcctcttttttgctcattccttttaatctcgccagatagacaagctggtcactcaccttcactttcggatacagcccccgttcttccgggagatagccgattttttcactgatggaataattgaccggcttccctttccaggtgatatgcccgtcagtcaggcttaaaagacctaaaatcatccgaaaggtcgtcgtttttcccgcgccgtttgcgccgagcagcccgaacatttccctttcaggtatttgcaggttcaaattgtcaacagcggtaaagctgccgaatgttttcgttacattttcaattgtaagcacgaatccaactccttccttgacccattatatactaataatgggtaaaaattaatggaggattttaaattctttatcagaatatcattctataaagggggtgacatgatgggacaatatgtattgaccgcattccatgcgtcgggagaaacgctgctggatgaacggatcgaagcagataatgaggcggaggcgaaggccgccggagaggctttgttagaggaaaaaaagcttgagaacagtactcaccgcttggtaaatgaagccggaaagctgattttattccacagataacagaagctttccggcttctgtattttaccggttaaattgcggcgtccgtttttctaaaaaggcgcggatgccctctttatgatcatccgtttttctcatattttcctgggcctttcgttcaagagataaaacgtcttttaaccggctgatatggaggctctgataaatagccttcgtttcaatcatcgctgacagcggcgcatgcagcaatcggtcgatatacggttgtgccccctccgcagggccgccgctgaacagcccgtcggcaagcttgagccgcaccgctttttcagccggcaatttttcaccgctccaaatcagttttttcgcttcgatctcaccgacgcgtctcattaataaataatggcctcctccgtcgggaaccaatccgatgccgatgaaattcatcgcgagtcgggcgttttcttcggcgagcaccacatcggcgcacagcgcgaaactcagcccgagccccgccgcggctccgtggatggcggctatcacaatttttttcatatcatagagcgtcagcgtaatggattcaatcattttcatgagccgttcatattctcccgaatcatgatccgacgtcatcatctggatatcaccgcccgcggaaaatccccggccttccccccgcaagaggacgataagcgcttcgctgtcggctgccataacgcatgcattttccaattcccggagcatttgttcattcagcgcgttgtaactgtcaggacggttcagcacaatctctgcgatctttcccttttcttcataacgaatatactgcatgtttactccctccttgaatccgcttacatattttgttcaaatgatatattccttcccccgaagcgaaactcctttatttttcaaggtcaacagataccgaaaaatgcatatcatttgaaactgaacatacatttttatatagtgaaattgatatacaaaacaaaaaggggggaaaaacaccgataatgaaatatgtgatactcagcttgttactgagcttttttatggtgctgttccccccttcggatgtcgctcttccttcccaattggtgacagaaacagacagccatgtacaaatttcggtctacccgcaggaaacggaatcggcaaagacgccggttcaaaccaaaaccgctccgcaaggcctgtcaaaaggatacggtgcgttatcccggatgatctccctgttatctgtcaaacctcttgatcaattcattgattccacaatggaaaggacatgcgccattccgatacaataccagtcaaattacctccggcatcagaccatttctcattgccaatctgtatttacggtgtaaaaacagtatattccggagggattttttatgaatattaaagaaaacgatctgcccggcatcgggaaaaaattcgaaatcgaaacgagaaatcatgaaaaaatgacgatcatcattcatgatgacggcaggcgggaaatttacagatttgatgaccgcgaccctgatgagcttctggcaagcatttcacttgatgatgcggaagcaagacagattgccgcgattatcggcgggatggtgtacaaaccgcaggcgcttgaatcgattgaaatggcgttcagcgatctgattatcgaatggtttaaagttgaaaaaggggcaaaagcggcagggcggacgctcggcgaactggatgtgcgccaaaactatgacgtgacggttatcgccatcataaagcatgaccagaaaaagtttttaaacccgggggctgattcgctccttgaagcaaacgatacactcgtcctctcaggtgaaagaaagcatctgaaaaaactgatccaagacttcctctccagagacggagtgtgatctgtttatggaccatctcgtatttgaagtcggtacggcgttagttcttgtggccattgcgagtgtcatcgccaataaaattaaattctcgatcatccccttcctgatcattttaggaatgcttgtcgggccgcacgcgccccaggcgggcatcattgatctgacgtttatcgaaagccgggaagtgattgaatttttcggacggatgggcgtcctgttcctcctcttttacctcgggcttgaattctcagtcggaaaattagtcaaatccggacgttcaatcgccgccggcggaacgatttatattctgattaatttcagtttagggctgatctacggatttatcacgggcttttcctttttggaagtgcttgtattggcgggcgtcatcacgatatcatccagcgccattgtcgcaaaggtgcttgtcgacttaaagcgcacggccaatccggaaacggagctgattctcggcatcattatgtttgaggatatctttctggcggtttacttatccgtcgtttccgggcttgttctgggagacgcgacgtctgtcgggggcgcgctgatgtcaatcgtgatcgctttcggatatatgctgctgtttttcattgccgcccggaaattgccgcctctgctgaacaagctgcttgatatccgttcaaacgaggtatttgtcatcgtcattttcgccgcgctctttttcattgccggcttttccgaaacgattcatgtcgctgaagcgatcggcgcgctcttgctcgggctcgtgttttcggagacggcccattctgacaggattgagcatcttgtcgtgccgttccgtgactttttcggcgccatgtttttcttcagtttcggcctcagcattgatccgttttcactcggagatgcggtatggctcgccctcggcgccgttctgctgacgattgccggaaactttatcgccggcatgatcgccgggcgccgggcggggctttctcataaagcatcgtccaatatcgggctgaccattgtgtcccgcggcgaattctccattatcgtcgcaaatctcggcatcgccggcggcctgtccgcttcacttaaacctttcgccgccttatatgttttgatactggccatcttcggccctttgctcacgaaagaatcgaagcggatatatctcctgctgaacagcgtattcaaatggaagacgcctgaaaagaagccgcagaaatcataaaaaaaaactgacctcttcataagaggtcagtttttttgagcgggaagaaattgctgaaaagccgtttttttattaatggagaaatgctcttttcccagaatggtattgatgattttttggtttctgtaaacagacagcttcaaattcgtagcgcccgttccgtgagcatgatcaagattcgttaatgtgaaaaaatgatgccgtctgtcgtccttaaagacaagacgggaatcggccgtcactttaaaccgtttctcatcctcccattcgatatcgggggcgattgccgtaaaccattccggaatatgaggtttaaagccggtcgccaatatcactttttctgaatcggccgtaaaagtttcatccatctgccattgatgaaagctcagtacacagcgcccgttttgcttttcaattttttcaagctccgccatcggctgaatatacacgtcaggcgaacctccgctgatcgatctgtgatacagggcgtcgtaaatggtggcaagtgtgtcagaatcaatgccgtggcgcagtccgtccagctcagggagtgtgttcagccgttctttaaaaggcaggcggttaaaatattccacataatcaggtgtaaacatttcctgcccgagcttggcggtttccaattctcgaaatccggcggagcgtgtcacccattgcagccggctgcgccggtattgttcatcatgcaataagtcagaaaagatctccgcggcgctctgtccggagccgaccactgtaattgattcggcgccggcgagctcgtctttccggaacaaatattccgtgctgaccatcgtgtcctgacgcgctccgtcatcaatctctgcgggaataagcggttcagaccccgtccccatgacgaaatgcttcgtctgatagacactgatgcttccgtcctcaatgttcttgacgctgacttcataatgtccgccggcatttttcacgccgattacctctgagccgaaacggcatgatttgatttctgaagccgcccagcttaaatagtcgttaaattcccgtctcggaatatcaaattcattaaacgtataaaaccggtacagccggtcatgttcatggagaaagtttaaaaacgtgtagcggcttttcggatcggcgagcgtgaccaggtccgccagaaacgccacctgtaaatccgttcctttaattaatagaccgggatgccacgcaaattctttctttttatcgaaaaaaagagcgtctgttccgggtatatcctctaacaatgcggcaagccctaaattaaacggcccgattcccgctcctatgacatcatacatattatgcacctcttgcgaataacagtctgatgatcttttcccgtttttacagacggttaaacataaaaaaacggcacgctgattccgtgccgtttttgatattataatgcagatttgacgaacatctcatctaagtatttgattttctcttctgtataatgctcgaatcggtcattatatgatttcgggtctttcggattggcgaagtgcgtgatttttccggtttccggatgaatgaatttgcttgccgccccgcagccgataccgataatcgtctgcacttcttccataatcataatgttgtagatgctttcctgacccgggaaggagtagccgacattttcaaggtttccgagaatatttttctgccgatacaagtagtacggcgtatagccgtgctcttttgtccagcggacggcgtcatccatcatgcgggacacttcctgtctgtcggcaactttatacttatgcttgtttctcgtcatttctgacgcccgtttaaaagaaagcgtatgaacggtcaaagattcaggcatcagcttttccgtttcttcaagactgtgcctgaactcagccgtcccttctcccggcaggccgatgatcaggtccatgttgatattattcatgccgtgtttgcgggaaagatggtatttttcgatggtttcttcaacggtatggtgtctgccgatagccttaagcgtttcgttttcataagattgcgggttgatgctgattctgtcaatcttatacttatttaaaacggcaagcttttcctccgtaatcgtgtcgggacggcccgcttcaacggtaatctccctgatattcgcgacatccgggaaagagcggaccatttcttcatataaaagatccatttcttcagcggtaatgcttgtcggcgtgccgccgccgaaataaatggtcgtcactttgatatcatgccgcttcagccattctccgattttctgcatttcatagtgaagcccccataaaaaggagccgactcttcccgcctgtccttgaatggcataagccggaaacgtgcagtaggcgcacttcgtcgggcagaacgggatgccgatataaatgctgacttcatctttgacccggtacagatcgggaaccgcagcgagctggcggtcgacaatctcctgcatcagattgattttttcatcatggatcagatagtcttttttcagatcggcatgcgcctcttcttttgtcaggccgctctgcagctttttatgaagaagtttagtaggcctgatgccggttaagattccccatttttgtgtcatgcccgtatgtgattgaagaagatttaagtagacatatgacagcgtgtttttcacctgtttaaatacttctttttcgctccatccggcaagaagcggtttcgtgtgatgttccttttcgccggttcctttgatttctccggataccgacacgctgtctgcatcttgagaaatggcaagtgagatgacgagatcagagggttcctccgtttcgccgtacgtaagaacacactcttcaaaaaataaattcgcgatgttttgcagcggacgatgcagcctgtcatccgttatgccgtctatttttatttgcaatgtgatcaccttatttttcagattcaaaactttctttagtgtacagaaagaacaggctaaaatcaatccgcgaaaaagccgcagaccggcgtttcgcgtctgcggctcttgattacggccgtttcatatggaacttatcgagaaagcctttgcggtgctgcatgcggaaatattccttaatcatataagccactccctgttcatcatttgaccttgtcacccagtccgcttttctttttaattcatttgaagcattccccatcgcgacgccgagaccggccagctcgatcatcggcagatcatcttcctgatggccgatagccacaacctcttccattgaaagcccgagatcagcggcgaccatcgaaagtccgctttcttttgaaacccctttaggcacgatgttcagtttttctccgttgacgcggatcacatcgacggccgggaatgctttcattatcgtatccgttatatcagcctgcaggccatcttcagcatgcacttcaatgacgggcgctgaaaccggctcatcaaggagcaggtcacttaatgattcgacaaactgcaccggataaaagatcgggtcagacggatgaatcatcgttttcccgaccagattggagttcactttcttcttgttaccgatcgaatatttttcgtgaagaagccggatattgcattgatagctttcgagcacctgaacgatattaaacgtgtgatcttctgatattttcttttcaaaaaacggctcatctattttttcagaaatgtatgcgccgctgtgggtaatcaattttgcattcagctttaatattttcgccactttttgagcggagcgaaaatggcggtttgtgaccagtgtgacgtaaatcccttttttcttgacgtattcgatggcatcctttgtcgtctgatgaagtttgccgttggagcgaagaagcgctccgtctatatttaacgccagcatttgttttgacacagagaagtccccctccttgatgactgtacttgtcattaggatatgaccctgtctctttgtttagaacaaccttttctccgcagcaaaaaagcctgcctcaagcagactttgaactgtcgttttgttgggatacgatcgatttgctgccttctccccaatgtgcatttctattaacgaaatatatcaggaaccccttatttgaccgttgatgcgctcgtttcacttactctctgttgctaccccttaacataccaggcagtataggcgaccgtatccttagatcatctgtaagtgtaggcgctttcagagttattatctcaataatattgttaaaaaacaagggtttttttaactaaaaaaatcaggggaactatctgtgctgaatgtatgataaaattgaaaaggaacgtatattcgcatataataaaagaaaaaaagcggtgactgtcatgtctctattaaaagatatttataacgaagaatttgcagaagcacttctgcacagagtcaaatcggcgtatccggcttttgagcgggacaagtgccgggcgctgatatttcaggaagattggcccggactgacgttaaaacagcggatgcgccggatcacagactctttatatgaaacactgccgaaggattacatacgggcgcttgacgtcttatatgagacagctccccatttcacagggctcgccgggattatttttcccgattatgtccaacagtacggaacggatcactgggaagaatcaatgaaggcgcttcagtttttcactcgtttttccacttccgaatttgcggtccgcccgtatatcaggcttgaccgggagcggatgttcaaagagttcctttcctggacggagcatccggacgaacatgtcagaaggcttgccagcgagggctcaagaccgcgcctgccgtggggaatctccattccggctcttcttgaagatccttctccgattctccctgttctggaccgcttgatgcaggatgactcgttatatgtcagaaaaagcgtggcgaataacctgaatgacatctccaaaacccatccggatcttctggcacagaccgcagccgagcggttcggaagctgtccgcacacggattggattttgaagcacgcctgcaggacactgttaaaaagaggagacaaacaggcgcttgcgattttcgggtttgaagacgcctcccggatttcattggaacgttttacactgaattcggaaacggccgccatcggaacaagcatacatttttcttttcagatccgctcagccgcccggcaaaaagtcagggttgaatacgcgattgattttgtaaagaaaagggggcaccgcagccgcaaggtgtttaagatgtcggagtccgccatggataacggaaacgtaaaagccttcagcaaacgtcattcccttaaagatttaaccacccgcaagcattatcggggaattcacactctgtctgtcatcattaacggaacggtaaaaggttcgcttgatttttctgttgaataaaaaaacccctccatttcatagatggaggggtgtggagcttattgcgggctgccgtaaagctcttcaagaggtttcataatgattttgtttaactcgccgatcagcatgctcatgcgctgttccgcttccatcagctgagaaatcaattcatgctgctgtacgagagcaaccgttttttgtgcctgctctacctcttcctgagtgatttcttcacctgacatctgtttctgctgcagctgcatctgtacattgcggaagttatcaaacatgcgttttgcggattcatctgcgtttacttgatcataaagccctctcagacggctgtattcatcactgtttcgcaaagctttttcaagatcatatgctgcatcataaaaatgaactgccatagtaaccgctcctttcttcctttcggacataccactccactataacagactgcggagcgactttcatcatcggcgtatgttttccttagaaaagaatgacaaacaaagcctgaattgctccgattatcccgccgagcagaccgcctaaatacgttatcatcttaaattctctcttggaaatcgacagcaccatttcttccagccgttcaacgggaaactgatcaacctgctctttgaccacttcctcaagacgcagccgtttcagcacatcctccaaatgagcggcaatactgccgagtgccgcatcaagcagcttcggcgcgtacgtccccgtaatctccccttcataacgggagatgatgtcaccgagccggcattcgaaaaagggcgcggtttgaagtgcggccaaagcccgctttttcatgctgaacagcagatctttcgcattccacttttcatcggcctcataaagtgtataagatttgagcttgccccattcttgagaaagcagatcagccagaagctttttcgtttcctcattgcgcaaaaactttaacagctcaggcagcacacggtctgccaagcttgaattgccgaggaacatctgcaccatgccgccgagcatcccccgggaattcaaaaagtcgtcaatcatatttccgagtctgtctttcccttcttcgctctcaaaataatcaatgctacgcttcaggatataatctgcggccagcgggattttttcatccagcttttcctgcagctcatcaggaagccagtctttgatggcgcggtgctcatatttccggtacaggtccgaaagcttttcatcggtaaaacggtcaatccaggcatccgtcttttcctgcggattccggatgcccgcggcggccaaagcttcgtgcaccgtcatttcggaagcggccattttttgcgtgaattgttcggcgaaaagaagcgcctggtttttaacgttatctgataaaagccgcttttttattccttccggggttaaaaggtggttcgtcaccatgagccccatttgttttgccaattcatcccgtcttttcgggatcagccccggcgtaaacggaacccgttttccgaacaggtaatacggccggtacggacgaaataacatctgaatggcaagatgattcgtcaccgcgccgatcgcggctccgatcacgatcataaatagaaacgttcctgctatgcccattccttttcttctgcctccatcttatgttctattttcttgatgatatatctattcgtattatagaggctggcgggcatgcgggcaaatgaagaacctgaattgttgtttgtgaggaataaggcaagatgctgtttcgtactctttacagtagatcatcttttatgatgcgcttagcatatttattggatggaagggccgttccatcagcggctttttgaataaagggggagtagtaatatgacaacactcggttttatgtctgtatcccgccggcacgaagaagattacgccggggaattggctgaaagagcgcctcaatataatgtgcgcttagcccgctttacaccgtttgatatatttccggattctttgcgcgtgaaagcgctcgtctatcacccgcaaagcggaaagtggaacgaaacggaaatcgatattcccgaatatatttacgaccgctgtttttacggaaaatccgctgaagcgcaaaaagccaaaccgatcgtcgaatggctgaaaaaatatccgaaaacggaatttatcgggcgggggcttcctgataaatggacggttacagatgcgctccaaaagcatcatctgatcagtccctatattcctgaaacggccgaagtcagccgctatgaacaggtgcaattatacttagccaaggaaaaagcatgtatacttaagcccgctttcggcgcgggaggcagaggcatcatcctgcttgaaacaggcaaaaaatcaattaccgccacttactatatcggaaaaaacaaacaaacaaaatcattttccaatcacgtgtcttttaagtcttggtgcaaaaaagtgctgcagcaccgctatttgcttcaatcctacttaaatatccaggataaagaacggcatccgtgcgacatccgcattttcatgcgcaaaacggagtcaggcgtttgggaaacggtcggaaaagcggtcagaaggggttatcagaacggtcttttatctcatttgcccggaggatcagaaccgattaagtttgacatatggtttgaggaaattccgagaaagcagcaggccgttttattggatgatgtcttttcgatcacccaatccgttccttatttccttgatgaacggttcggaccgctgtttgagctggggctcgatatttgttatgccaaagacggacgcatctggcttttggatgtcaattcaaagccgggacggaaagctattttaagcgtggctccggaggcgaaagaggatttgtatacgggtccgctgagacgcttccgcgaacttcagtcacaggacagcaggaagggagtattaccgcgtgaatcataaagggatgattgtcggcatcgataaaaaaagcaaaaatacgctgtttctcccctcctccatgaaacgggaagggcttttatccgctgccttcgggaccaaggttgtcaaatgccgtgtagccttttctcaatcacttgaaaaaagcgcgctcctttctgaagatttgtttgaggagctgttgataccgtataaaagccgggctgactttctcatacacggccagacggtgcacatcggaccgctgatcggcgttttcacagccgggttcacatcatcgccgtcccgcccgttaagagaccgtacagccttcttttccaagatgctctcacttcatgaacaggcgaacggatattgtttcgttttcggagctcatcagatcaactgggaagaaggcaccgtccaagcgctgatttataaagaaaacagctggaaacggacgtccgtcccgcttccgaatgtcgtatatgacaggctcccgagccgaaaaacggaaggagttccgcttttacagcagacaaaacagaggctgatgaatgactatcagattccgtggtttaatccgcaattctttaataaatgggacattcataagcttctggaaaaaaacagtctcaccgcttcacttcttccaaaatctgtcctgcacccgaatgcagaggcgttagagacgttatgcaacacatttgacaccgtctatatcaaacctgcagacggcgcactcggaacggggatttacagggtggaaaaaacagatgccggcttatctgtcaaacacacgaatgaggaaaaaacggtggtgacggcagagtattcagatgcggcatccttcatgaaatcatttaaagaaaacaatgacccgtccgcatttttaattcagcaaggcattgacctgatccggctggatggacgccccgtcgatttcagggtgcacacgaataaaaacgccgaggggaaatggacagtgacggccattgcagcaaaaatttccggtgaaaacagcatcacgacgcatctggcaaccggcggagaagtcaggacgttagctgaattatacggcgatccgcgagagagagtcggcatgatgcggaaactttccaaagccgccttggcggtcagccgcgtgttaaatgagcacattgaaggttttatcggcgaaatcggttttgacctcggcgtcgatcattcagggaaagtttggatgtttgaagccaattcccgccccgggcgcagcattttttcccatccgaagctgagatcggtcgattacctgacaaaacggagaaattttgaatacgcgtcctatttatcagaacggtccatcaccgccccggaaaaactttggcggtgaggctgtctttttttggttttacccgggacaggcacagaatgatgagctacaatgaacaagatcaacatttcctacaaggagcgtgaacgtcatgatttcgcacttcagctggaaaccgttattcaaaaaagagaaactgcccggatggcggatttcattttactggcagggtacgcattacgaaggggtttaccataagtccggtgacattgaatggggacacacacatccgggaaaagaagagccggctctcgtaaaagagctgcacgaattaatgctttatcacatatatgactgaaagctaaaagctcagccgcatcaggctgggcttttcttttcccttccgctatttaccacccggttttccgaatgagatgccctttgattcaccataatacgtagtacaaagcggcaaacagcattgggtgaagccgagctggcaatggttttcattccgaaaatcatcggctggtgcaattccagcaaacccaaccatactacttaataaaggagatcatacaaatggcaaacaacaactcttcaaaccaactattagtacccggcgctgctcaagcaatcgaccaaatgaaatacgaaattgcttctgagttcggcgtaaaccttggcggagaaacaacttctcgtgcaaacggttctgtcggaggagaaatcacgaaacgtttagtatctttcgcacagcagaacatgggcggccaaggcgtacaataactcaataaatggcttacagaaggcgcgggataccgcgtcttcttttatgccgtcacccttttttcctattccacataccctaggaaaaaaggagggaaaacatgtcattcattgcctcagtcaattgggagctgtttcagttcgtaagtgtttctttggtcaatgaatatgttgcccaccatttcccgtttattcacaggcattcttttccccgctgctttgaatgatataatgagcggcgaggaggttttttacatgaacatcgctttactcggagcaacgggaagagtcggacaggcttttataaaagaagcgcagaaacatggacacatggaaatattcgctcttgtcagatcagccggaacagtccttcccattcctgaaaaacagatcataacagggaatgcgaggcggcgggaagatgtcagccgattgatttccaaagcggacacagtcgtgagctgtctcggcacggacggtgacgataccctttcagccgctatgacccatataatagacggcatgaaacggcatcatgttcagcgtctgattacgatcggcaccgcgggtatccttcaatcacggcttatgcctgatcaataccgttttgaatcggcagaatcaaaacgaaaatcaacaagagccgcaaaggaacacgcccgcgtatacgagatgctgctggcagaggatcttgactggacgatcatctgccctacctaccttcctgacggagacgctgccggagtttaccggttcgaacaggatcgccttcctgaagacggcgccgaaatcacagtcggagacacggcacattttctgtaccgcgagctgatcagcccgcagtttgtcagaaaacgggtaggactggcttactgaatgaaaaaagggcgaatcttttgattcaccctttccgattacaccgcggatttcgccgttcctttctgtaattcatacatttgatggtactgccccttttgcgccattaattcgtcatggcttcccttttcaatgatgcggcccttttccagcacgagaatctggtctgcgtgtctgatcgtggaaagccgatgggcgataataaatgtcgtgcgcccttcttgaaccacttgcagcgctttttgaatgaccgcttctgtttcggtgtcaatgtgcgccgtcgcctcatccaaaattaaaatggccggatcgaacacaagcgctcttgcaaaagaaatcagctgacgctggcctgaggacagtgtgccgcctttttcggtgacgggctctctgatgcccttcggcaaagattgcagaaggcttgcggcgccgacttggcgaagcgcttcttccgcctgctccagagaaatacgctgatcatcgagtgtcacattggagccgatcgtgcccgagaaaagatacgggtcttgcagcacaatgcccatatgcgacctcagctcctgccttgacatgctgtatatgcttttaccgtccagcaggatatcccctttttgggcatcataaaaacggaacagaagattcaggatggagcttttgccggaccccgtatggccgacgagggcgaccgtctcccctttttcagctgtaaagctgatgtgtttcagcacctcttctccctttcgatatccaaaagaaacatcgcggaattccactgtcccttccgcctttctgtctgcgggagcgccttcttcttccgtttcctcctcctgtaaaagctcgaatactctggcggcagagacacgggccaattcaagcttcgaaaattggttgacaatccccgtaaccggctggaacaaacggtttaaataatcaacaaatgcatataaaacaccgatcgaaacaattccggccgcactcagactcgcgcctccgaaataccagatcagcccgacaaacgccagattgcgcaacacattgacaagactgtgggacatgagggaatttaaggacagcattttgtttttgtagcggaaatgagcttcattcaattcttcaaattccttcatcgtttccttctcgcggcggaacgcctgaataatcggcattccttgaatggactcgttcattttcgcattgatgtcactgttaatggaacggattttttgattgaagacggatgcatatttgcggtacacaaccgaccagatcattaaaatcggaataatcagaaggcaaacggcggccagcctgacgtcaagcataaacagcgccgtaaaaatgccgagcatataaacgccgcttgtgataaatgtcgacagcaccgttacatataaatccctcaccgcttctgtgtcattcgtaatacgggccacgacttttccggcaggcagattatcaaagtagcggatcggcattttctgaatgtgtgaaaatacatcctgcctcatgcgctgtatgatccggttcgctcccatctgcagcagataatgctgaccgtaatgaaaacatacggaaaacatgagcaatcccgcataaatggcggtcaacgtcagcaatccttttatttccggacggtaaaattcaaaaatctcctgtcttgataacgtaatgacgggatatgacctgctttctttaccgtttgatattgtcagccggccgtcagacaccgaacggtttccgtcaaaactgacgggacggtcaacaaaatagtagcccgcaccgacttgataaatgtgcgcctctccggttttatccgcccccggtttgagccggtcctccctgacataatcatgcccccggaacctgacggcgcccggatcgtccgcagaggctttaacccatgttttttcaatgccgagaatgtggtcatcaatcattttttttccgataaacgggccggtcagctcagtgccgaccgcaataatgagcaggacgaccgcccatatcagcagcttcttatattgaagcgcgtaattccataatcttctcccggtcttcatgcgcccgtccccccttcttcaagagaggacagctgctgcctctcatattgttttcgataccagccgttctgcgccaatagctcccggtgcgtgcctctttcagacacccggccttcgtccatgacgagaatgagatctgcgtgttcaactgccgagagccggtgggtggtgataatcgttgttttatgccgccgttttttacggatgctgtcaatgatggcggcttccgttttcgcgtctacggcagaaagcgaatcatctaatatgagaatatcaggatcggtcaaaagcgctctcgcaattgagatgcgctgcttttgtccgcccgagagcgctacgcccttctcgccgacaagcgtctcaagcccgtcggaaagcatgccgatatcgttttcaaaatgcgcatctttcagcgcgccgccgatttcctcttcgtttgcatcctgccgtccgtaaagcagattctcctttacagtcttagaaaataaaatatgatcctgcggcacatagccgatccacccgcggagctcctcaagcgggatctcctgaatcgggacgcctgtaaacgtgacctctcccgcaccgggcggatattcacgcagcagctgcttaatgatcgtcgtctttccgcttcccgtcttcccgacgatgccgagtgtctgccctttttctacggaaaaagatacatcggaaaccgccggtcccgctccgctcggatacgtgaaagtcacttgttcaaaaacaagacgcccgggctccttgatgccggcggggcgcttgggcccgatcacgtcaggctcataggaaagcgtctcattgacacgatccaaggaggcattgccgcgctgcatgatattgattaattctccgatcgcaaacatcggccagatcatcattccgaggtacacgttaaacgataccagctctcccagcgtcagccggttttgaaaaacgagataagcgccgtagccgagacctatgagatagctgaggccgacgagaagtttcacagtcggttcaaaaagtgaatcgataaacgccaccttcatatttttctcatatacatccgccgtcatatcaccgaaccggctgacatcatttttttcctgcacaaatgcccggatgacccggacgccggataccgactccagcaccttgtcatttaatgatccgaaagcatcctgcgcttccgtaaaccgctcatggatcttttttccgtacaggctgaccgcagccgccattatcggcagcggaataatcgcggcaaatgtcagcttccagctgatgagaagccccattgtcaaaaatatcgtcagcatatacatcgtcgaatcaacgagcgttaagaccccgaagcccgtcgtcatactgacggcctgcaggtcatttgtcccccgcgccattaaatcgcccgttctgtatttctcgtaaaacggcggtgacatttgaagaagccttcccatcagctttgaccggagaattttctccatgacattcgccccgccgaaaagctgatacatccaaaaataagacagtaaatagacggctgccgttaatgcgagaaaaacacatatgtaaaacagcatcccgcttttcgtaaacacgcccgccttcatatcgtctatcgcattaccgagaagtttaggcggaaacatctcaatgacattcacaatcaataacagaacaatcgctgtcgtatagcgcagccaataggctttaaaaaaccacgcgagcttttttaatacagtaaacaaataccgtcatcccctttcatcaatcagccgccctcaagcttttccggattgtttttcattgttttcgctaatgccgccacatgcatcacacctgtctttctttcatttttttgtataaaaaaagacatgaagcctcagctccatgcctcttattattataaataaggtacagacccgccgtttatgcgcgactgccccgtttttaagcaaatgttcagaaaacggaagctgtatggaagtcacgccggtattcagctgaagatgagttgacaagctttagttttgacatgatccatacctcctttttcctatattgttccttcatcatataaataaatcctttttttgtcaatgcgggttttacatttctgccgcacgggtattgtaaaacaaaccttttttactgaaaggatgaggctgatgtttcacgcagaccggttgatagcagcttttgacggaagtgatgatagtaaaaaagcgcttcaaaaagccatagacctttcaaaaacgttccacgcggatttaacggtcgtacattcccacagtgcaaaagatacccagacgattgttgatcccccgaggccgggagccggggcaacgtatatcggcggcgggattgcaagcgttcctgacccgcttcaggcggaaagaatctcccctgatccgatgatttatgaagaccgtacggaagaaatcgttgcggaagcgagaatgctgatgaacgacagccagattgacggggatatcgacattttagaaggtgatcccgctgatgccattatcgagcatgccgaccgtatatcggcggatttgatcgtcatggggagccgggaccagaacaggctgaaaaaacttttattcggaagcgtcagtgaaaaactgtcatcgaaatccgatattcccgtgctgatcgtaaaataattctttctgtaaagcagcttaatcaaaagctgctttttttacagctcccggctgttttttctttttttcggcattacaaaaaaactcgccatgatcaaaaaatcgatgcacaatacgacagaccagccctttaacagtccgctgagcgcttcggtgcgggaagcgtcctgaatgagaaataccgttccggctaaaagaacgccgccgatgacaaatgctaatacatgtcttccccatccttttgcataatgtttggcataatccagtccgtaccgcttgaccggttttgccccttcctttaccacataatagcggaaccgctcatccgcccactgaatcatgctttttccgaaggcgacagacactccgatataaacggccgccactgcatgcgccatagtcgccgccgcccctctgtataaatcagctgcggccgccagaaacagtacggcatccaatataggaatgagagcgaaaaaaaacattccgagcttttgccgcctgaatatatagcgcgccgccaatccgaagatgacagccgcccaaaaagcagcctcacaaatgacaatcaaccaagcaatcgcgttcaatccggttcccccttatcgttttctaaaatgcattgtatcactgctttttatttaatacaactgtattacaaaattgcaagaaaaaatatttcctgttacactggaaccatgcctaaaataatcgatcatgaaaaaagaagaaaacaaatagccgaagccacttggcggacgattttggagcggggaatggaaggagcgacagtgagaaacatcgcccaagaagcgggtctttctttaggcgcgctgaggcactatttcaccacccaggatgagcttttagggtatgcgatgacactcgtaaaagaaaaagcggccgccagaattaacgaagttgccatgaaagatctgccgccgaaagaaaaagcggtgcgtctgatgcttgaaattatcccgacagatgaagaaacgatggctgaaatggaggtgtggttcgctttcacagcttatgccagacataagggagaagagtttcaaccccagcaggacgggatcttggcatatatccgcggcctgattgactggctggatgaaaataagcttctgaaaccgaatcttgataaagaaaccgaagcggagaaaatgtacgctatcgccgacggattggcgctgcatgccatgcttgaacctgatcgtctttcaaaagagaagatctcccgtgtactcgttcagcatatcgaatctctttttatctgactggagcaaaaaggccggatgtgttccggcctttttttcagcttatgactgaacgccgagctcctgctgaatgtgcgactgaaaagcctcctgaatcgttttggctacaggtcccggcgatccgcttccgaccggttttccgtcaagggttacgatcgggattaattcagacgtggttgacgagatgaaaatttcatccgcatctctgagttcctcttcggtaagagccttctcccgcacctcaatcccgttttctttcatcagctctaacagtttcatccgcgtaatgccgtttaaaatcagctcatttgcaggatgcgtccggacggtgccgtttatgacggcgtatacattggatgaggttccttccgtgaccgccccgtcccttatcagcacggcttcataagcgcctgcttcataggctttttgttttatcatcacattatacagtaaattcagactcttaatgtcacacctcagccagcgtttgtcttccgccgtgatggcctgcgctccggctttttgttcattttccggttttttcactgaaaaggtgtatgccgtcgtctgcggctccaatccttcgtcatactggtgcttccgcggcgccttccctctcgtcgtctgtatatagaccccgccgtcaatgagtttgttttcctgtacgagcttttgcagatcccattctatgtcctctgcggagaacggcagggtgatgccgatttctgcggcgcttctgaaaagacgggcgatatgctcacgcagaccgaataaggcgccgttatacactctgatgacctcatacacaccgtcaccgaattgatatccgcggtcctcaatatcaactgccgcttcttcacgatcaatcaactggccgtttactaatgtcttcatgtaaaccctcctaatcgttatctgccgtgatgtgcattctcagctgttattgtcaactattctatcatactgaacgagccggctgcggagtttatttttttcttaaaatcttattattcgacatcttttctatgtcttttccagttttgttcctgtatacttgattcgacatacatatgctgttaacttatggcacttcgcaagcctccgctgttatcggcattatgcagaaacttatgctactggagagattgttatgcgcaacacaaaagaaggtgcttccccttctctgttttcattggcttttaaacttacgagtttagcagttttgtgcggactgcttctggtaatcgtcataatgggatattccgcttccgccgcaaaaaacaaacaggtcaccgtgaccgcaaacgggcagcttcgggatgaagcagaaagcctgcggctgaaaaatgattctcccgacgtcttaatgaaacatttgcagaaagagcgtgacccagggaaaaaaacggtatatttaaccttcgacgacgggccgtctccatatactgaacagctgttgaatgtattgaaggcaaatggcgcaaaggccactttttttatgcttgaaccgcggatgaaagcctataagcattccgtgcaaagagcgaagcaggaagggatcgcgctgggcctgcacggcgtgacgcacgataatcacctgttttatcaaacaccgacatcaccgctgaacgaaatgcagcagggacgcgatacgctcgagacaatcactggagtaaaaacggatcttgtccgcacgccttacggcagtaaaccctcattgacggatgcccagattaagaatctcgaaaaagacggattcgtgtactgggactggacgatagacagtgaagactggaagtacaaaaacgcgcggtacgtgccggaagtattgaatcagctcgcatatttggaaagcgttcatacgagcaggccgcatgtcattttaatgcacgatctgcctgcgacggtgcacgctttaccgagcctgatccaaaaactgaaagcccagggctactcctttgatgttctgacggatcaaatgattcccgtccatgaataagaaaagccggatctgtataggatccggctttttttatgtcgcggcgctgatccgttttgcaaattcaccgatcttctcatggatgacaagatcaaataaatggtcgcaatatgtcggctcaaggttaatgatcacttgcttcaaaccgggaatccggcccgcatcctcagggacaaaccttgccggcgccacttcaagcgaagtgccgatcacaagaagaagatcagctttatcaagcttttcataaagggtttcaaaatgctgaacgagatcgccgaacagcacgacatccgtctttaatacggtgccgcataccgcatgatcaccgacttcggccgtacattccggcacttcgtccttcagcagatgagaaagcccgtagcgcgctccgcagcgggggcatgcggcggtctgaattgaaccgtgaagctcatagacactgctgcttcccgctttcttatgcagtccgtcaatgttctgcgtgaaaatgtctacctgctttccccgcttttcaagatccgccaaatacgtatggccggcattcggctcatagcttccgctcattttcatctgaaagagctgtttgaatttaggccagaattcacgcggacggcgttcaaagtattccctgctcatcgcttccattctggaggtgtcttcggtccatataccgcccgccgaacgaaaatcgggaatgccggattccgtgctcattcccgctcccgtcagcaccaggatacgttcagcctgattgatcaatgttataaacgcttccactcttccaccgccttttctttttatcatatcatgaaaaaagaacggcgcctgttatgcccgttctttttctccggaatgatccttcacatgaaccggatcatcgtggctcttctgttttacgaatacattctggcccggataggcgaactccacgccttcctcagcaaaaatatcaataatccggcggttgatatcctgccgcacgtccaggctttccgcccagacgatggtctttgtgtaaaagttgaaaaacagattgtaatagctgtccgcaaacacgtcaaagttaaccataatcgtatcatcatgcacgccttcatgttcacgaagcatttccctgagccttgtgatgcaccgctctaaacgatcaatcggcgtcgcataagaaacacgaacggaaaacgtgacctggcgcttcgtcatcctcgtccagtttgtgatggcttccatggacagcgttgaattgggtacggtaacaagcgccccctgcgccgtgcggaaccttgtgcttcggaatgtgatatcttcaacgccccccgtcacagatgacgtctcgacccagtcgccgatcgtaaacggcttttccgtaatgatgataatgccgccgaaaaaattgctgatcgtatctttagccgcaagcgcgaaggccaagccgccaagtccgagtccggccacgaacccgtttacatcataattgaattcctgcgcgatcacactgacgctgagcgcgagaatgacaaagcgcagcaccttggataaaaacggcgccaaaatgtcatccatatcaagctcaaagcgctgattgactttatgaaataaaaacgaagacgccgatgtcagattgcaaagcccccaggcgatcagcgctatgatcaaagagcggtacatttttttgacaatgtccatctgcccgtctaaaaacggcgaatactcaatcgccaaaaacagacccagcgccacgaaaaaccatctggccggcttgtcaaacgctacggcaatctgtttgaatatgtcggttttcggcttgttcgccaatttgtaaatgagctgaaaaaagtatttgacaaacagttttctcaaaacgagaaaagccgctaaaattccgatgctgatactgatctgcaaaatatggtcaagagtaaaaaagctctgaaattgtgtcatcatggcatatgctcctttgtcttgtcgaaaatctattatactaaaacattcggacatcagcttgttttaatgtctttaggcagcctgaaaaaccccggcctcagagcacagccggggtttttcacacattcgttcatctttcagccagatacaacagggtcaggcactatttcttctttgattgtgtctgtttcaggagagtcgctttttggatttcagcatcggtttcggccttaattctttcttccactttcaatctcccttttcccatgatctcgcctcctttttgccattataaatcatcactgcggattgtaaaccgaaaaaagcactatctttattccaaaaaaatactgttttgcacattcaccagtttgaatcgctgtgcatatacgaatctgatataataacagaaatgcccatgaggggagctgacaagcttgtataccatcgctcatcgcggcgcatccggttacgcgcccgaaaatacatttgcggcatttgatatcgctgccgaaatgaacgctgatttcattgagcttgacgtccagctcacaaaagacggccagattgtcgtcatccatgatgacaaagtcgaccggacgacggacggctccggttttgtaaaagattttacgctgaagaagctgcagtctctggacgccggcagctggtatggggctgagtttaaaggggagcggattcccctgctcgaagaggttctgaagcgttatcattctgaaatcggatttttaattgaactgaaagggcacgtttctcaagtcggtcttgaaaaagcagtcggccagctgttaagcaggtttaccttttccattcaccctatcgttcaatcattcagtctcaagtcgattcagacctttcacgacatgtatccgtccgttccgactgcaattatcgcaagacccagcttcgggatgttttccaaaagccagctggccgcttacaaatcagccgcaaattatgtcaatattaaatatacccgcctgaatcggttcttgatttccaccgctcacaaacacggcctgaaagtatttgcctggacggtcagaaatcacaagacggccgaaaagctgcaaatgatggcagttgacggcattgtaactgattttccggatattatttctaaggatggctgatatgaaacaatacatcgcaatttttatcggaggcgcgcttggcgcattgctccgctttgaaatgagcgcgcacattcacagcggaactttcccgggtgccactttcctcgaaaacgcggcgggaagccttttactcggtcttattacgggttatttcatcattcgggctaaacgccctcttttgaccgcctttttaggaaccggtttttgcggaggtttcacgacgatgtcaaccttcgcaaaagaaaccatttttctgctgcaatcgtctcccgcagcggctttttgttatgctgccgcgactttattcgctggtcttgctcttgcatacgccggcatttttttgggacggcggattgcccttcacgcagccggaagggggcatgatacgccatgacgattgtcctgatgcttatcgcggcgggtatcggagcggtattacggtctctgctgggtaagacaatttcagaaagaacaaaaggttttccgattccgcttggaatggctgcggtcaacctgctcggctccttcagcctcggcatattcaccggcttgggtctggataatccttctgccggcgtcatcatcgcgacgggctttttcggtgcgtttacgaccttttccaccttcagtattgaagccgtgcagctgatgatgaacaaccgcataaaggaaagcctgctctacatcgctgtttcagcagccggaagccttttggcgttctggtgcggctttgttatgatatccatttaaaaaaaccttgagcttatttttcgctcaaggttgcgttatgaagcatgaccgtttccggcacgggcagcgggcggtttattgtcccctgaccgcccgggcggccctgttcttctttgagttcaagctgtttaataaaccggccgtccatttctaatatgagggcagtgtatcccccgatttgtatcgactcacccgcacaaatgtcaatattccgtttcagcacaagaccgccgatcgtgtcgacttcctcttcaatctctgcgccgagaagatgattcacctgatcgatccgaacctttccgtccagcacataatggcgttcggacagcttttgaatctgcggctgttcgtcctcatcaaattcgtctctgatatcgccgacgatttcttcaagtatgtcttcggtcgtcacaagaccggacgttccgccgtattcatcagacaatatcgccaaatgaatccgttctctctgcatttttatcagcaggtcgtgtatcgggatcgtctcgatgacttcaatcaccgggcggacgtaagacatgatggatacttccgctttttcatcttctgtcataaacagcagatctgaaaagagatgcttcgtattgatcatgccgatgacactgtctttgtccccgtccgttacgggccagcgcgtatatttgtctttcagcatcatatcaagcatttccggcacgtccatatcagtggaaacagccgcgatttcttttctcgggatcatgatttccttggcgatccgattatcaaaatcaaaaattttattcacaaatgtatattcagacggattgatttctccgttttttaaactttctgacagcaggatccgcagctcttcttcagagtgggagccttcatgctcagatgccggctttaatccggccaaaccggtcagaattctcgcggagccgttcagcacccaaataaacgggaacatgaacacgtaaaataaccgaagcggtccggcaatccataacgtcagcttttccgctttttgaatcgcaaccgttttaggcgcaagctcaccgacgacgacatgtaaaaacgtaatcagcccgtacgccgcagcaaaagcaatcacatgctcggcagaatccggcagccccataccctgaaacacaggatgaagcatccgctcaaatgcaggctctcccagtacgccgagcccgatggatgtgagtgtaatgccaagctgcgaggcggataaatactcatcaagatccgtaatgatacgctttgcgagcaccgcccgtctgtttccttctgagatgagctgatcgattctggatctcctcactctgacgatcgcaaattcactcgccacgaaaaatgccgttaacgcaatgagcacaccgattaaaatcaaactgtcaatatcgtccatttcaccttatcccgaattgaaggataaggacgtcacctcctgatttcatcgttttttcttaagcgagaggaacgaaatgggtgattgactacacagagggccccatcctgccacctcctaagtcaaagcatgattgtcatttgtatagtttattgtatcacaactccattctttcatcattttcagatttttcatcatataaaaacagccttcaaaaagaaggctgccgttatctgcttcggaaatgattttctaaacaaagcgccgtattaatccccccgaatcccatgcttaagcttaacgcatggtgtacggtatgggcgctcggcccgtcggtcacccactgaaatgaatcgtcaatcggctccgttaagtttcggatcggatgaagcttgttttcccgcatttgcaagagaacagcaatgatttccaccgttccggccgcactcagaccgtgtccggtaatcgattttgtcgcattaatccgcgcgtgcgacaggccgctttcagaaagcgcccggcattcagtcttatctccgatcggcgaaccggtgccgtgcgggttgatgtaatcgatctctttcgctgaaagaccggcccgctccagcgcctggcggatcaccgtcatttcgccctctgctgaaggattcgggttgcggttcgcatcggaagccatcccccagccctttaagccggcccacgatcgtgcgcccctctcttcggcagattcagcgcgctccagcacaatcgccccgcacgcctctccgaatataaacccgtccgtatgccggtcaaacgggcggcaggcggcttcaggccgttcagcgtatgtatcagtgcccatcgctcccaaagaacggagagcgtgacactccatgtacgacagatcggccagcgccccgatcacgatgcaccggtcaaacaggcctcctttaattccttgagcagcctggataaccgccgcctggccgcttgccgacgcgccgccgaccgtaaaggccggcccttttatcccgaattgctccgtgcaaagccccgacaaatcactatccataaaagaaagcccgtatgtcggatttacaaattgcggcgtttcaccgtttttctcaaaggcctgcagcaattcgcgctgcgtcatattcgacccgccgatgatcagaccggtgcggctgtgatcagcgccgtctaattgagcgtcatgccacgcttcatataaagcgataagcgccgtctttcctgataatgcggcccttcggtacaagcgcttcgacagcgcgtccggcggcgttaattcgctaagctccgcgccgataaacgaactgcctttctgccggccgggacgtttcatcacatcaaaggcgtgccgcccctccatgagcgcatcgagaaacgcctccttgccttgtccgaccgcggttaagactccgattcctgtaatgctgatgtctgatgtgccattatttctcctcgacatttgtccgttctcccatctttatgtgttggaagctatgaagaaaaatcttgatacagtgctttgaaaatatcgcgcgactgtctgatctgttccgaaggcacgctgaaagataatcggaaatagccgctttttccaaatccgctgccgggtacgatcaatagtctgtatttctgtgcggcatgcatacagaacgccacctcgtcttcaatcggtgatttcggaaagacgaaaaagcctcctttcggcatttcaaattcgaagccggcttctgtgaggatgtccaccataaggtctctccgctttctgtaaggttcagcgtcaatcgaaagatcatccattttcgccacggcgcgctgcatcatgaccggagcgttcacaaagccgagcgtccggttgcagaaaacgaacgcatccgtcagaagatcgccctcaggcatttgggcgtccgccgcgatatacccgagcctttcccccgcaatgccgagatctttactgaacgaactgactaaaatcacgcggtgatacgcctgaaacggattcgcctgctcttctccgtagatcagctggctgtacggttcatcaaataaaataaatatgctttggccgttccgctcttcggcttcttttaataaggcgcctaattcgttaaggtttttctggctgagcacagtccccgtcggattatgcggcgtattaacgatcagtcctttcgtacggggtgtgatcgcacctttaaccgcttcaatatcaatctcaaatgagtcagtcagcgggcagatgacgggtctgccgcggtaattttcaacatacgctttatattccgcaaaataaggcgaaagaaggatgacttcttcctccgggtttaaaatgctcttcagcgcgacattcagcgccccgccggctccgaccgtcataactgtatgcctggcggaaatctcggtctgaaaccgctctgacaaaaagcgggcaaccttttctctcgcctccggaagcccttggttttgtatgtatccgtgccgccctgtttcagccgcttcgcaaagcgcctttttaaacgtttcaggcggctccgcaaccggatttcctattgaaaagtcaaacaccttatcggcgccgaactcttttttcagccgagcgccttcatcaaatagtttgcgtatccatgaacctttctccaggttctgtgtcacttcccttgataaaccggccactgtcatctgtcccttctgtctttttctgccgtttctatttacaatgattatgaaagatttacatggcgcagtcaacgctttttcagacagcctgccgccccgtttcaggagaaagacggaaaacaataaacttgtgcaaactccccttcatatattaaactattctcataactataacgtgatggttggggagggatttagatggggctgagacttatcgcatcagtgaattagcagagcttgccggtgtaacgaaacgcacggtggattactacacaaacctcgggcttttaaagcctgacaggtcttgttcgaactatcgttactacgatacacttgcacttaatcggttaaagtttatagtcgcttgtaaaaagcagcgattggccctgtctgatataaaagatcgactggagaaccagtttccctcttcagccctgcctgacgatgttggaaatctggcatcggaaattgatcacatgaatcaaaacatctccgggatcttgaatcggtttgaaaagcttgaaccagaggagcgcgcccagctgaaaaaaaggctggctcctgaaaagcttgcagtgcttcaatcatttatgctgctgttaagttaaaccattatcttactaacaggaggtgttaccttcatcttcccaaaaggagtgaaggttctaattggacattgtgaatttgattttagtcgcggttttaatcgcgctgacggcatttttcgtagcatctgagtttgcgataatcagaatcagaggctcacgggttgaccagcttatagcagaaggaaataaagccgcaatcggtgtcaaaaaagtgaccacgcatttagatgagtatttatcggcgtgccagctcggcataacattgacttccatcggtcttggtgtcttaggcgaatcaacgattgaacgcttgcttcacccgcttttcacaaagataaacgtaccaagctcattatcgcatattatttcatttattctcgcctacgcgatcattacattcttacacgtggtcgtgggagaattggcgccgaaaacagtcgccatccagaaagcggaagccgtttcaatgctgttttcgaaaccgctcatttggttttaccgcatcatgttcccgtttatctggcttctgaacaactccgcccgtcttttaacgaagacgttcggtctggagacggtgtctgaaaatgagcttgcccactctgaagaagagctgcgcatcattttatcggaaagctataaaagcggtgaaatcaaccagtctgaatttaaatatgtgaacaaaatctttgaatttgacgacagacttgcaaaagaaatcatgattccgcgtacggaaatcgtcagtctgccgcatgatatcaaaatttctgaaatgatggatatcattcagattgaaaaatatacccggtaccctgtcgaagagggtgacaaagataatattatcggcgttattaacattaaagaagtgctgaccgcctgcatcagcggcgaagtatcagtcgactcgccgattacggattttgtcaatccgatcatccatgtgattgagtcggcaccgattcacgatctgcttgtaaaaatgcagaaggaacgggttcatatggcgattctgtcggatgaatacggcggaaccgcggggcttgtcaccgttgaagacattattgaagaaatcgtcggggaaatccgtgatgaatttgatatcgatgaaatcaatgaaatccgcaaactcggcgacggccattacatgcttgacggcaaggtcctgattgatcaagtgaacgaactcctcggcatccatttggaaaatgacgaggtcgacaccatcggcggctggttccttacccagaaatacgacgtcgaacaatacgactcgattatcgaagaaggctgcgaatttatcattaatgaaattgacggccaccacgtcgcatatatcgaagtgaaaaaactggcgtttgatgaactgctggaaactgccgaacaaaaagaagcataacaaaaaagcttgcgcgtctgatacagacggcaagctttttttcatttacagttgttcaagttttttctcaagctctttaattctggcattcagctcttctgtcatggccgcaagcctctccttcggcgcaagatcggaaaagtcctccaaaaaaatcggctcgccgatgataagccgcatttttccctttttaaacagcgcttttcccgtagacggccctttatatgcggccggaacgagcggcgctttccccatttgggcgatggtcacggcccctcttttcagcgggacgtcttcagaagttctcgtgccgctcggaaaaatccctacaatcttcccttccttcagaagcttaatcggcgttttaatgctgctcggacccggattttcacgatcaaccggaaacgcgtgaatcttctttaaaaaacttccgatccactttttctgaaacagctcttttttcgccatataatgaatctgatggggcaatatcccgacaccgagcgtgaggacgtccacccagcccgcatgcgtgcacgcgataacgaatcctttatcagacggaagattctctttattgtatactttgactcctccgcgcagagaaagaatgaatttgatggcatttgcacaaaacttatacataacgcacttcctttgttgtaatgatcaaaagtgttctctctctattataacaatattttttattacctggtactaataaatatatttttcctccgccgatctctatcttttatgacggattttgggtactatagagaaatggtgtttgatgaggtgaaaatgaatttaagccgtttgcatggaacgtgcaactttaaacctttcttatgcgtgtataacatagaggggagaaaaggcagtgacgatcgatgaaatttaccaaatgtatatgaatgatgtttaccggttcctgctctccatgacaaaagacaagcatctcgctgaagatttgctgcaggaaacctttatgagggcatacatacacattcactcctacgaccacagcaaagtaaagccatggctttttcaagtggcgagaaatgcgtttatagattatgtcagaaaacataaaaaggaagtgaccatttccgatgacttaattgggagcctttttcagacggctgttcaaagcccggctcatcagattgaaatcaaggaagtgctgacagggtatatgtccgaacttcccgacaattatcgggaggccttaacactgtattatttaaaagaactgaattacaaagaagcatcccatattatgaatatttcagaggctaattttaaaagtgttttatttcgtgccagacagcggctgaaagcactttataatagaggtgttaatgatgaatgaagaatttaaaaagcgtttttaccaatacaaaaatggagaaatgagcgaccgggaaatggccgcctttgaagaagagctggaaaagcttgaagtctatcaggagttgattgaaagcgaaatgcaggacgaccgggaatgggacgtcggcatcagcccggaaaaacagaaggccattttgtcatacggaaaacgcaaatcgtatttgcggatttcagttctcgccgtcatctccaccttgatgattttgccgctttgcactttgggaagctacctctattacggtttgggaggaaaagaaagcaccggcaatcaattaatggaaaccgcagccgtgacggtggcgaccaccatgccgaacgtactcgtcgatacctccggactgaaaagccaggtgaagctgtttgggatgaatacagagtttccgctgcaaaagcagatcggcacaaaaacgaaatccgtcggcggagaacggattgaaatgtttttagatacggtcaaatcgcctgccgttaactactatgatctagacgcggcacaggcaaagcattattttgcccatccttccggcttaaaggaacgcacgattgacaaagccggacagacattaaaaaaattgcctgaaggaagcgtggcggaggtctatctttcttatgaccgggcctatccttcttctcaagtatattctacttttaaaaaatacgatgtgaagtttttatggaacgcggtcgaaacggagaaaaatctgaaagacagtccttatgccgagccgttaggatttcccgggaaagattccaagatggtgtcctctttcgaaacgcaaggacagacagaccgtgaacaatttatcaatgcccttgaatttatgtcccgccataaaaaatgggcgcatgcaatatcgaaacgcaaagacatgaatcttggcagccgaatcgactatgttgaacatcacggaatgaacgtatacggctctgtcgtgacggggccgacaaaagaaatcgaacgtctgctgaaaaataaaacagtaaaagcagcaaacatcggtgaggtggaattatggaattggtaagaatttttaaagagcataatgttttcggctggatatcagtcggtaccgcgattttgtcgctgctgcttttgaacgtggcaatcatcagcaatgtgactttctattcttatcagatgctgccgtttgcgatggccgccgtgccgttcggcatcattgagctgtttattaaaaaaggacggacgggcccgggactgctcggtgtcatcctcaaccttttcgtcattgtttgtgtatatacgatcgttgccgttgatacgaatctgcaattcggtttttaaacataaaaacaggcccttttacaggggcctgtttttttaaaatgaaagaacgccgattaaatgcagcaatacgacgatgatagccagcggcacgaggtatttcagaaggaaataccacacctgaaagaaacgatagccgatggcggaaccgcttttcatctcggcgaacagctcccgcttcggtattttcagcgggatgaagattgatattaataaagcgccgagcggaatcagcacattgctcactgtgaaatccgctagatcaaaaaacgtttttccgaacaaatgaacatcaccgagcacaccgtatgataaacacgacggaattccgactaagaaaatgagcagaccgcttgtccacgacagcttcttccttttcgtttcatcacctttcccgacagtcgctacgataatttccaccatcgaaaaggccgaagtcagcgcggcaaagaaaaagaccgccagaaagctgataaaaaacagcgagccgaacggcagccggtcaaacacagccggcagtacggtaaacagcagtgtaggcccttcatccggtttaaatccgaacgaaaaaaccgccggaaaaatggccagtcccgcaaacagcgtgacgagcacattcatcacaacaatggaacccgccgatcccggaaggttttgggttttcggcagatacgaactgtatgtcaccatgaccgaaacgccgagcgttaatgtaaagaacgcctgtcctaaagcatataggatggattccggcgtcaaatcttcaaagtgcggaaccaataaaaatctaatcccctcaacggcatgatcgagcgtgactgatcgcagcaccagcaatagaaacagcacgaataaaaccggcatcagcaccgcactgacacgttcaatccctttctgcacgccttttgcgacgaccgccactgtcaagatcataaatacaagctgcgcggcgagagtctggatcggattttcaatgaccgtcccgaacaccgttccgtactgctcctgagtgagcccggataaagaacccgtaacagcttttaacacataaagcaaaatccacccgccgacaacactgtaaaaagacaaaactaaaaaacaggccgccacacccacataacccgtgaggtgccataccgacttcggcgcggcttgtttgtaggcatcaatcgcatttgtctggctccgtcttccgaaaataaattcaccgagcaaaagcggatagcctaaaagcacggtaaagaggacgaatacaagaaaaaaagcgcctcctccgttcgtacccgctacgtaagggaacttccaaatggctcccaggccgatcgccgaaccggcagcggccataataaatcctatttttgaggcccattgaacccttttttggtcagacacgactttccacttcccttccgccctatattatcccttattcactgcgataacttaagcccatttcaatatgtttcattattccgaaaaataaaaaggagcggcgggtgccgctccttacaaatccccgtttaatttcgaatgctttctcgaatataagaaataaatcaccagaccgatgatcagccagataaagaaacggaatatggtggtggcgccaaggttaataatcaaaaatacgcagaacagaatggacaatatcggaataaagggaacccccggacatttaaaagctctcggcagatcaggctgtttctttctcaatacgataaccgccactgaaatcaggacaaacgcggcaagcgtgccgatgttcaccagcttcgccagctcatcaagcgggacgagcgagccgagtaatgccgacaggatgccgaacacccatgtcaccacgtgcggcgttttatgcttcggatggacttttgaaagcgcccccggcaccaaaccgtcacgggacatggcaaacatcaccctcgtctggccgtacagcatgacgagcatcaccgttgtcattcccaacactgcaccgatatcaataatcccggccacccaattctgtccggccatctgcaggacgagagacacgggatggtcaacgccttcaaagcgggcaaacggaacgacgcccgtcataatcgccgatacggtcacatacagcacggtgcagacgattaatgaaaagataattcctttcggcagatccttcgccggatttttcgtttcttcagcggcggaagagacggcgtcaaaaccgataaaagagaagaaaacgagcgccgcggcactgaaaacaccgccgaaccccatcggtataaacggctgccagttgtgaggtttgacatatacggccgcaacggcgataaacaatagaacaaccagaaccttcaaaatgaccataatattattgacccgcttcgattccttaatgcctaagtagaggaggaatgtaatcgcaagcacgataacaaatgcggggagattaaagaatgtgaccgtgcctttaatggatcccggcgcggccgttaatgcggtcggaagatgaatgccgaagcccgccaagaatgattgaaaatagccggaccagccgaccgaaaccgcgctgacggcgagcatatattccaagattaaatcccatccgatgataaatgcgagaagttcacccagtgtcgcataagtaaacgtgtagacggaaccggaaaccgggacgcttgaagcaaattcggcatatgacaaagccgcaaataaacacgcaagagcggcgatgacaaatgaaacggtcagccccggccccgccgtgacagcgcctgttccggttaatacaaaaattcccgttccgatgatggcccctatccccagaagtgtcaaatcaaaggcccctaactctcttttcagcgacttttccccgcccgttgcggcaagcaggtcctgaatgcttttctttctgaatatgctccccttcatctgcttcactccttgtaaatcaatatatgttagaatattcagacaacaatagcaataatgactaaattcttatttttcgcatgaaatgtttcagcacatcattcctttctcctacaccatattatagcgaaaaatataaaaatgaaaataacttttttgaaaattctatatattatttcagttttcataaaacagaactcagcggattctccgctgttaaatattaacattagtaattcagctggcggcttctattttttaaaaatcgtattcatatgtaatcaaataaaaatcccgccctttttaaaagcgcgggataagacttgcttattatgttgaaataaacctgcctccatttacgtgaatggtctgcccagtcatataggaagattcgtctgaagccagaagcacataagctcctgcgtgttccgcaggctgtcctggtcttcccatcggagtgtccagaccgtgcttttccaccttttcttcagtaaacgttgccggaatcagggcggtccagatcggcccgggtgccaccgcatttactctgatcccctgatcggccaatgacatcgccattgaacgcgtaaaggaaacgatgccgcctttcgtgcacgaatagtcgatcaatgatgtgtctccctgataagcggtaatcgacgttgtattaatgatggcgctccctcttttgagatgaggcagcacggcttttgtcatatgaaacatggaaaacatgtttgtacggaatgtcttctccagctgttcagccgtaatatcaagaatcccgttttgcggatgctgctcagccgcattattaacgagaatatctatttttccgtagtgatctaagacttgctggaccgccttctgacaatgcgcctcatcaccgacgtctcccggaattaacaggcaatcggcctggtattctctcgcacgctttttcgttctctcggcatcggcatgttcgtctaggtacaggatggcaagatccgccccttccttcgcgtaagcgatcgcagccgctgcgccgatgccgctgtctccgcccgtaataacggcgacttttccttttaatctgcccgacccttttacatccggatcctccaagagcggttttggctccatgtctgactcaatgccgggctggcggttttgcacctgcggcttttgtccttccgtctgtctgtccatcggattcatattctcacactcctgcaattggtattactgagacgataccacgcagtgcggggagttaaacggacaaatatgccggtaattaaagctgctgagccgtttcgggaaaagcgccggtgtatttcgcagacggtctgtaaatcatgttgtcagcggactgttcaagcacatgtgcgcaccagcctgccattctgcttgctgaaaaggtcggcgtaaataaatcattgtcgacatcaatggcctgcatcacagccgctgcgtaaaactccacattcgtatacagcttccgtccgggcttatattgctctaacaagcggatggcttccttctccacataaagcgccaagtcaagcgacggatcatttcccgccacttcttcagcctttatgcgcagcgcttccgcccgcgggtctttcgttttgtacaccctgtgcccgaagcccatcaggcgttctcccctcataagcttcgctgtcaaatacgcttctgcattttctttttccccgatgtcttcaagcattttcgtgacgcctgaaggcgcgcctccgtgcagcggccctttcatcgtacccagtgcggcagtgacggcagacactaagtccgattcagtcgaaaccgtgactctcgctgaaaaagtcgatgcattcatcccgtgttccatcgccagaatcatatacgtctcaagcgctttcttttgggctgcggacggctgcctgcctgtcagcatatacaaatagttttcaacgtgtccgtatcgcgcctcgggtgacagcgcttcctgcccttgtttacggcggtatctgtacgcaataatcgtcggtgtgacggcaatcagtttaatcgcttcttccggcttgggcggatatgtaaatgaatctgtgcccaaacctgaaacagccgttctcagcaccgccatgtcgtccatttcatccggaagcgtttccagtaagccgatcaaatgtttcggaagcccgcgctcggctgcaagttcttcctgaaacgcaagcaattgccgctcatcaggaagcgccccgttcaaaatgagatacgccgcttcttcaaaactgaattgcaatgcgatatccttcgcgtcatagccgcgatatattaaatgccccttttctccgtcaatgtggctgatcgccgtttctgcacaagtaatccctttcaatccacgataaatcaatttcattcccccttatcctctttctgttattatagtaaatataatatttaaaaaataatgaatatttttaagggaattaattaaaacttttaatcagaggagtgcatctatggattttaaatggcttcacaccttcgtcaccgcggcaaaatacgagaatttcagaaaaacggcggaaacgctttttttatctcagccgaccgtcaccgttcatataaaattattagagaaagaaatcagctgcaagctgtttcagcggagcggccggaaaatacaattgacggaagaaggaaaagcatacgtgccgtttgccatgagacttttggaagactatgaaaacagcatggcggagctgcacagggtgcgccagggctactcgcacacgctgacactcgctgtttcgccgcttatcgccgacaccgttctcccgtctgtcatgaagcgttatacagaggacaataaagaaaccgaaatgacggtcaccattttcgaatcggaagaaatcgcctctcaaatcagaaacggctcagccgatatcggactgagctgcttaaaggtgcaatcatcttccctcacttgcctccccctgtacaatgaccccgttgtcctcgtcgcgccacccggccgaaaacccgggacagggaaggcggatgaagtgaaagacctgttcggacaatatctgcttttgacccataaccatcctgactattgggatgatttgctccgccaggtcagaatacagttccctttcgtcaggacaatgaaggtgacacagacgcatattacgaaacgatttattaaagaggggctgggcgtctcatttctgccgctgtcagcggtacggtccgaactcgccgcaggcagcatgattgaaattccgtgcgaattcgcccagatgccgagcgcgggcgcgtacgccatcgccctctatgaaaatgaaaaaaagaaaacctttttagattttttatcacattttcatttttaggtgaaacaaatggagctctgccccgtctaaataaaaaacccgttcggatgaacgggtttctctcactgctagaatcttttcgcgcccaggtagcgcggtttccagtagctgttattcagatcacttgttgtgacgccgtcagaaccggcatggatgaacttgttgtttccgatgtatacacccatgtgtgaaggaccggcttgatatgttgtaaagaagacgaagtctcctcttgacgggctggatacgctcttcattgagctccagtatcccgcagtgcttgttctgccgacactcgtctgtttgtttaacaggtaccagataaatccgctgcagtcaaagccggaagtcgttgttccgccccatacatacggcgtgccgattaaagattgcgcatcagaaaccagcttgtttacattcaggctcgtctgtgcaatattatggctggatgaaggcttctttgatgacgaagatcctgaagacgctgaaccggaagttgatccttttactttaagcacttgtccgatgcggatcaggtccgtttttaaaccgtttaaactttttaattggtttaccgtcattttatatttattcgcaattttccaaaggctgtcgccttttacgactttatatgtagacgatgatgacttgctgcccgaatttgaacctgaagatgatttaccgttgatcgaaagcgtctgaccgatgtaaatgatatccgattttaatttgttctcagatttaatggaattaattgacgttccataccgatttgaaagtccccataatgtatcgcctttttttaccttaatcgtttgcgcagacgccgcgcccgcaaacaaagtcgtccccaaaaccactgccgttgttgctgtaacaagttgctttttcatattttcctccctgaatgattctatctattttatgtgtctcttttttaaagtttttatctgtttcctattataaggttcaatttccactagaaatagacttgacttcccgtgacaaatttcttactaattcgtttttgaaaaaagtttttaagggtattaaatatttcaatttgatttcaaacgtgacgaaaaacgagtcaatttgtcatgtttttttcctgtgatcctcgtattttggaaaaacaaagcagtttactttccaaataactccttgttaaaaaaatcctcgtctttttcaaaaaagtgaatggttttcactctttcttgaaaacataagttacaccggaatttacatttctaacaatgtttcacctgaaatttacaggaggaacaggcgctctttacaaacaccccctaccattagacatgcagacacgattaaaggaggacgagtgagaatgagtctatttaaacaggttcgatcaaaacttctgccggcggcagccgtatccgtgctgacagccggtctgattgcgggcgcggggtttcagcactctgaacaggctgcggcaaaaaaacagcctgacaaaaacgagatcagaaacgtcatcttcatggtcggcgacggaatgggcgcaccctatatgaacgcctaccgttcggtcattaacaaaggaaagccttcggatggtatgaaactgacggcattcgaccccaatctcgccggtatgatgatgacttatcctgacgatcctgattccaatattaccgattccgcggcggctggcacggcaatggccacgggcgtgaaaacgtataacgcggcgatcggagtcgataaaaaaggaaagcgggtcaaatccgtcctcgaagaagcgaaacaaagagggaaatccaccggacttgtcgcaacttcggagattgcccacgccacccctgcggcattcggagcccataacaaatcccgaaagaacatggatgagatcgcaagcagctactttgatgaccgcatcaacggaaaacaaaaagtcgatgtgctcctcggaggcggcaaatcaaactttatccgtaaagaccgcaatgtaacaaaggatttcaaaaaagcgggatacagctacgtgacatcaaaacaggagctgaaaaaggaccgtaacaagaagattctcggcctgtttgccgatggcggactcgacaaagcaatcgaccggtcaaacgctgtcccttcattagaagacatgacaacggcggcgatcgacaggctgaacaaaaataaaaaagggttcttcttaatggtcgaaggaagccaaatagactgggcgggacatgacaatgatatagtcggcgcaatgagtgaaatgaaggattttgaaaaagcgtataaagcagcgatcgcatttgccaaaaaggacaaacatacgcttgtcgttgccacggctgatcataccaccggcggattgacgatcggcgcgaatgacgataaaaactggcatgttgaaccgattcttgccgccaaaaaaaccccggcatttatggctgaccaaatcaaagcgggcaaatccgtatcttccgtgcttgcgcgttatacagacctgaaatggtcaaaagcggaaattaaacagatcgaaacggccgcaaaacaggatgctgacaagagcgtctacaaagcgatcattaagctttttaatgcgaaaacaaacagcggctggacaaccggcgatcatacgggcgaagaagttcccgtttacgcatacggtccgggaagagagtcatttacggggcttttaaacaacacggaccaggccaaaaagatctttcacatcctgaaacacggaaaataaaaaaggatgcggggatttccccgcatcctttcttcttttacaaatatctccggtgcactcctttgccgtcatacgaaaacatcacttctctgtcttcaagaacagattcgatgtgcacgctcctgccccacagctggtacagatacggcagcactttctccaaatatttcagatcaagctcaattccctcataccaatgtttaatataaagctcattattcttcaggtaatccccgtcattgacggtcagataaggaaatcccccgttgacccgcatgttcacgagctggtcgcgcacggccttccattctttgtcgatcactttatagtccctgccctgcttttggaataaatacaaatcctcacgcataacgagatctttcgtcaaataattgcggataaatgatatgtccgattcaatttccctgacctcaaacattttctcgcggccggaaccgggctttacccctgtttttttcatttcatctgtcgggttgtcataacgctcttcgatgtcttcaaaaattttcagccctaaataatacgggttgattcccgtttttgacggctgaacgacgcctgcgttcagcttcgcaaattcgatggcttcatctgaagtcaggtcaagctcgcggataatccgctgatgccaataggatgcccagccttcgttcatgattttcgtttccagctgaggccagaaatacagcatttcttctctcatcatggttaaaatgtcacgctgccacggttcaagctcccgcgaatgttcctcgataaacagcagaatatctttttccggacggggcggaaacggttttttccctcttttctttttcacctgtttcggcttatccattccccataaatcatcgtaaggcgatggcgcggtttcttcttcgtcctcctcttcgtcatcgacgctccacagcagcttcggcctgacgagcgacggatcgatatgctcctgaatcgccagaatggcatctaaaaaggactccacctcttttatcccgtgaattctttcataatgcttaatccgctccgccgcagccgccatactctcaaccatgtcccggttcgtattttgaaagcggcagttatttttgaaaaaatcacaatgggcaagaacatgggctacaattaatttattttggatcagcgaattgctgtccagcaaaaaagcgtagcaagggttggaattaatgacaagttcataaattttgctcaaaccgagatcataatggagtttcatcttatgaaattgtttgccgaaactccagtggctgaatctcgtcggcatgccgtacgcgccgaatgtataaataatttcagccgggcaaatttcatatctcatcgggtagaaatcaaggccgaaaccctttgcaatgtcggttatttcctcaattgcccgctgtaaaccttttgtctcctccgcgttcaagcgaatcccccctacttggacttatttataatgtatgacccctcctctcaaaagatgaaataacagaccggtttccgactgaaaactttcggcacatccgccctgtttgctttatatgtaagtgggtaaaacacacaccataccccaaaaagaaaaggagcgattctacttgaatacagcagacatgcttacgacgtatctcagcaaactcccgaatctgatcattgcactgctcgtcctgcttatcggctggggcattgccaaaatcattgaaaaagccgtatacaaaggcctgcaaaaaacaaaaatcgacgacaggctgttcgccgaaaaaaagccggcgcgctattcctcagaaaaagtcatcagtaaagtcatttattttatcgcattaatcatcgtttttattctattctttaacattctgcatctgacaaccgtggcttcgccttttgtcagcatgctgtcggcgataacggcggctgtgccgagcgttttaaaagccggcttgattctgctcgtgggctgggcggccgcttcgcttttcagctatctcgtcaaaaaagcgggcatgaaactcgctgaaaacggccggctcagaaaatggacaatggtgtctgaagaagcggagatgagcagatccgttacggccgcttcacgaatcgttttttacttcgtcttgctcttgttcctgcccggcgtcttgtccgctctccagatcagcggagtgtcagggccgtttacaaatatgattcaaagcgttttgtcctttataccgaaattattcgccgcggcgctgattgttttaatcggctggcttgttgcccgtctcgtccgtgatatcgtcacaaactttctggcgagtatcggaacggaaaggctcgccgcacgtatggggctttctatttatctgaaggatacgagcctgtcggcaatcatcggaacgattgtctacgtgctgattttcattccggtgatcatctctgcgcttgaccggcttgatgtggcgggtatttctgaaccggcgtcagccatgctgcacacggtcttcacaatgctccctaatatcatcatcggtattgtgctgatcatcgccggcatctgggtcggaaaatgggtcagcagcattgtatccgggctcctgcaccgggccggtttcgactctcttctcggtaaaatgggctttgaacaggcgggcaccccgaagctgacgctttctcagacggtcggcatgattgttcagatcatcatcgtcctgctctttacggcagaggcgctgcagcttgttcatctcgaatttctcgtcgttatcgcaaccggtattatcgcttacctgcctaatgttctggccgctgtatttattctcggaatcggacttttggccggacagcttgtcagcaggctgcttgccggcatgctgagcggaaaggaattcagattcctggcgccgcttgcgaaatataccattatcactctctcaatctttatggcgctggatcagctcggtgtcgccgacacgatcgtaaatgccgcgtttattctgattctgggcggtttcgcgcttgccttcggactttcattcggtcttggcggaaaagaatttgcctcccgttatctcgcaaaattggatcgcaaaattgaaaaacatcaatcggctgacgatcgtaagccgccgatgtcttaacgaaaaaaacgtgtgctcagaaggagcgcacgttttttttgagttaagggggcaaattccttttttttcattttagattcatatatgatagactgtaacagaagcaaaatctcttttttcgaggtcattctatgaaattaacgaactataccgattactctttacgcgttttgatttttttggcttccagacattccgacgaactttccaacataaaagaaatcgcagatacttattccatctctaaaaaccacctcatgaaagtcatttaccgtctcggccagctcggatatgtcgaaacgatccggggccggggaggcggaattcgattaggaatgacaccggaagacataaacattggagaagtcgttcgacatacagaagacgactttaacatcgtagaatgctttgactccaaaaaaaatctctgtatcatatctcccgcctgcaacttaaagaaccttctgaatgaagccctgcaagcttacctggccgttttagacaaatatacgttaagggatctggtcaaaaacaaagaggagattatgagactgctcagaagctgaaggaatgtccgcattccttctttttttatgccggcataagaaaaaaggactatttctattaatatgataaacgattgcagacaagtgccgatataaagattatcattactgatatcctcaccttgcggctgcaacgaatggggatagaaaaattatcgcaggaaaagggagattcactatgaaaaaaaaggtagcggtcggtttgactgcatctgcgatcgtcgggtctgcgttagctgtaacaccggcagaagcacaaacgattaaggtcaaaagcggagattcattatggaagcttgcccaaaactacaatacaagcgtggatgccattacatcagcgaatcatctaaaatccaccgttctttctatcgggcagacgctcaacattcctaacggcaaatcagattccggcagcaaaaagccatcttcaaagaacagcggcacgactaaaagcgtctatacagtgaaaagcggagactcgctgtggctgatcgcatctgattttaaaatgtccgtacaggaactgaaaaaattgaacggtctgacaagcgacttaatccgcgccggacagaagctgcaagtgacggggaaagtttcctcaagcaccgatcagaaaaaaaccgctcctggcagcagctcaaacagcagcaaaaagcagtcatcatcttccgggacctataaagtaaaactcggcgattcactatggaaaatcgcaaacagcgtcaatatgaccattgcggaactcaaagtattaaacaacttaaaaacggatacgatctacgtaaaccaagtcctgaaaacaaaaggaacgtcttcttcgggaaacacgccgtcaaaagacaattcaaaccaaaatcaaaaccagacgcaaacgtcctcctatacagtaaaaagcggagactcactctggaaaatcgcaaacgcatacaatatgacggttcagcaaatcagaagcatcaacaaactgacgtcagacatgctgcgggtcggacaagtgctgaagctgaccaaaacgtcttcttccggctcttcgtcttcaccgtcagctccgaaccagtccggaaatacagggaaaaccactacatataccgtgaaaagcggggattctttatgggtgatcgcccaaaagttcaatgtgacagcccagcagatccgcgagaaaaacaatctgaaaacagatgttcttcaaatcggacagaaactgacgattaccgggcagcagacaaacacgacaccgaatcagtccggcagcacaggcggcacaggttcaacaagcgcgaagattaatgtaatgatcgatgccgcaaaagctcagctgggcgtaccgtatgtatggggcggaacgacgccgagaggctttgactgcagcggtttcatttattacgttctcaataaggtcacttctgtatccagactttcagccgcaggctactggaatacaatgacatcagtcagccagccggcggtcggtgactttgtctttttctcaacttataaagccggaccttcccacgtcggtatttatctcgggaacggccagtttattaatgccaacgattcgggagtcgttatttccagcatgaacaattcctattggaaacagcgctacctcggcgcaaaacgtttcttctgatacctgataagctgtacggccgcataaggctgtgcagcttttttacagtctgaaaatattgatgctgatcacgtgttttgttacgggatggaaatacacttcagcacgggatgaaaacgtttcttttgcggtttgcaccgttacgcgaaacacgtctttcgtctgttcccggttcacttttgtacggcccatgtacgaataatcggtaagctcggcccccttgtattcacgttcaagctggttccatgcgagctgttcccatttttcaactgacggatcgaggtgttctgtatgccctttttcagcgatagaggcaatgagaatgccgcaaaacaagagggcaagcgcaaatggaagggatttcatctttatgttctcctgagtcgttttttgtcaatcttagcgtgtccaaagaagagacggatatgcggttttattttatgtctccctcatattgctatgccgcagtgataaggacaccaagttttcccccgttgcatccgggcttcggcggcataaactaacggagaacttctcattgaaaggagaagcgtaagatggatcatgccgattatgataaagccttgtattacacacaccggtctcaatgggacaatttattaattttgatggttcgtacaaaagatgatttattatcaaagcgtattgagcactttctacacgcgtatcatttcgaatatgatcatgccgtgcttgaaaaagagctgtattcccttctcgggtatattgatcatgcgacagagctcgcttatgaagatcaattagccatgctgacataaaacaatcccggcgtcagacgccgggatttcttgtgtttgtgaacatattcagctcttcgatcatgtctttcaggctgaccgccatatcctcagatacggtccggcgctccatgtcgatgtgaatcgggtctaagaccagctgtttcgggatgacatttgcatagacgccccgcatgaccgtccgcatattcgccagcgcattcatgcctccttttcctccgcccgccgcggcaatgacggccaccggtttgtatgcccagtgatcgctgcttaaaaaatcgatggcgttttttaaagcgccgctcatgccgctgtgatactcgggagataataagacgacggccgctgactttttcacctgccgccttaacttttgcactgaaggcagctcgttctgttcttcttcaccgttataaagcggcagttcactttcgctcaaatcaataaaatcggtatgaaaccgatctctgatataagaagcggcaattctcgtccgcccgttttttctcggtgtgccgctgatcactaatatgctcatgattttaccgcctttcccaaaacattatattttaccgcatacaatgccgcctgcgtccgatcggaaagattcagctttgacagcaggttggacacgtgggtcttcactgttttttctgaaataaacagggccgccgcaatttccttattgctttttcctttggctatttcttgaagaacatctttttcacgggggatcagctgataatatttttccttatcctgatcatcctgaaccatatgggtcagcacgtgaggcacaatatccgaacttccggccgccgtcctcaagcggtacggtcgcatgatgggtaatgccctccgtatcgcggcagttcgtcgtctgttccgcaaattcaatccgtttgcaattcattatgtttacggcctttgtcaatccgccattgctgaatttggtcagacaatagcattccccgctgcacatgagtgcattttcccgctgaccgagagcaggcggtaaataagcggatgcggcgagcgtataagacccgtccggctcaatcagaaaaatccaccctgtctgcagtccggtcaggctgagcagttcgcggagcactttatcaagcgcttcctttaaatcgtggttttggtttaaggtttccgcaatcgcttttaacgtttttaacgtttctaccgtcgttttcgtcaatttccctcactccggccaatcagaattatccatattatatcaattcttttctgtatattcctttgttttcagcatgaattttcctcatactttcggatgaggcgtataaaaaaaccgccggatgtcgcttccggcggtttgttgtttatttcgttttttccactatgccatccaccgttttcatgacggcttcagataatgcggcaagacgctgttcgctgtcttgtaaagaagtccccttcacggcgaaatagaacttcactttcggctccgttcctgatgggcgaaggcagaaccaagagccgtcttcaaggaaatatttcaggacatttgacttcggcagatcaatatcttcttcaagatgatcggcaaatacagtccgttttcccgttgaatagtcttcagcctgcgtgatttgttttccggccatctgcttcggcggatcgtttcggaatgaagtcaggatagcggaaatctgctctgctccctgtttcccttttaacgtcaatgacttcaagccttcacggtaatatccgtattctttaaaaatggacagcagcgcgtcataaagcgacatgccctgctttttataaaaggcgcatacctcgacggctaacagcgcagcctggatcgcgtctttgtcacgcgcgaaatcgccgattaagtagccgtagctttcttcatacccgaactggaacgtgtattggcctgatttttcatattctttgatcttttcaccgataaatttgaagcctgtcagcgtgtcaaccgtatctaatccgaacgatgaagcgacagcgcggcccaattcgctcgtgacaatcgttttcatgacgacaccgttttcaggaagggtgccctgttttttcttctcggaaagcaggtaatgcaataaaagcgcgcctgtctggtttcccgtcagcactgtgtacttgccttcgctgttttttacggcaatgccgagacggtcggcatccgggtccgtagcgacgagaatatcggcattttgttcttctccgagcttaatggcatattcgaatgccgcgtgctcttccggattcggcgatttgacggttgaaaaatccgggtccggcagctcttgctcctttacgacggtgacgtttttgtaaccgagtgcttcaagaccgcggcgcaccggtttatttgccgtgccgtgcagcggagtgaacacgacgctgacatccacttcatccgaaagctcgggatgtacggagatggaagtcagtttttcagtatacggtttatcaatttcttcaccgattattttaatcaaacctttttctttcagcgactgttcatcttcaacttgaatcgttaattcattttctatggcattcacttccgcaatgacgatgtccgcttctttcggcggcagctgtgcgccgtcatcgccatacactttatatccgttatattcaggcgggttatggctggccgtcacgacgatgccggcataagcgttcagctttctcaccgcaaaagacagctcaggcgtcgggcggagctcatcaaagacgtatgtttgaatgccttgggaagcaagggtttttgcagcttccatcgcaaactcaggagatttatgacgggagtcgtatgcgatcgcaacccctctttttttcgcgtcttccccctgtttcgcgatatacgccgcaagtccggcggatgctttgcggaccgtgtaaatgttcattctgttcgtacccggcccgatttctcctctcatgcctcctgttccgaactcaagatttttgtagaaaaaatcttccagcagctgctcgtttccttctgcgtccgccaataattttttcaattctgaatctaattgttcggcctgattccagcgttcgtaactcttactccaactcatgttcgtcctcctataatttcagcttatgaccatattttaatatgaagcggctgcccgtgtcacttgataacttaaccaaatgctttatgtaaaaagataaaagaagggctcatgccttttcggcacagccctccggttattattgttcgagcggaacaaccgcgtcgtgcagcagcgtatttaaccactcagtgtgtttttctttcgtttcgtcattccattggaatcggtcgctcatgtaatcaatcacggccgttttatacgtttgcacccatttgatgtcgaagaacagtcttcccgttctgcggacgaagaaatcggcaggtgtcgcagccatttcttcttcgatgctgtaagccgcttccgccagaatgtgaaccggaatctcgcgtttttccgcttcatctttcaggccttcaatccggctgaatacattttcaacgttagagccgtatctgatggctaactgcttagcggtttcctgtgataaaccgattttcaagccgtcttttgtctttgcttccacaaatgactcgaagtttttagagccgccgacatgtccgccggaaatcggcatcgtcttcgtcttgcagccgccgaagtcctggccgccctcttctttcaagcggtcgcggacaagatcgacaatgtgctcagccattttacggtagcccgtcagttttcctccggcgatcgtaatcaggcctgattgagatgtccagatttcatctttacgggagatctcagacgggtctttcccttcttcgtgaataagcggtctgaggccggcccagcttgattcaatatcgtccgccgtaatgttcagttccgggaacatataattgatggagctgacgacataatcgcgatcctgcaccgtcatgcgcgggtgctcaagtttttgtttgtaaaccgtatcggtcgtacccacgtatgtttttccttcacgcggaatggcgaacaccatccggccgtccggcgtatcaaagtacaccgcctgtttaagcgggaatacggattggtcgaatacgagatggaccccttttgtgtgctggagatgttttccgcttttgctgtggtctttttctctcagttcgtcgacccacggacctgtcgcattgacgatttttttggcgtacactttgtattccttgcctgacagcagatcttcaattaaaacgccgacaacttttcctttttcataaagcagttctttcactttagaatagttgacaggctcagcaccgaatttaacggcttctttcatgacttcaatcgtcagtctcgcatcgtccgtccggtactctacataatagcctccgccttttaagccgtcttttttgacgagcggctctttttgcagcgtttctttagcagacagcatgcttctgcgctctgatttttttactcccgctaaatagtcatacacacgcaggccgattgaagtagagaatgaaccgaacgtgccgcctttatgaaacggcagcagcatccattccggcgtcgtgacgtgcgggccgttttcgtacacgatggcgcgttccttaccgacttcagccaccattttgacttcaaattgcttcagataacgcaaaccgccgtggacaagctttgtggatcggcttgatgtgccggccgcgaaatcctgcatttcgctcaaagcgactttcattccccttgaagcagcgtcaagcgccgtaccggcacccgtaatacctccgcctataataaacagatcgtatgtttttttagtcatgtcttccagcatatgatcccgttccaaacttgaaaattggtgattcatcattacgcttcctccttgttgtcacggtatagaaaaagagaccacaacagccaaagcgcatgtcatcactttggtgctgtggtctctcctcatctcaggaccgttcctattaacttgttttcagtataccataattttatcttatttaaaagccatagctgcatttactgcttttttccatccgccgtacaattcaacgcgtttttcatcttccatttccggtttgaattgcttatcaaggttccactgatcggcgatttcagtgctgtccttccagtagccgacagcgattccggctaaatacgcggcaccgagcgcagtcgtttcattaatttccggacgttcgaccggcacatcaagcaagtcgctctggaactgcatgaggaagttattttttaccgctccgccgtctacacgcaatgtttttaaagagatgcctgaatcagcctccatggcatcaagcacatctttcgcctgatatgcgagagattcaagcgtggcacggataaaatgctccttcgtcgttccgcgtgtcaggccgaaaactgagccgcgcacgtcactgtcccagtacggtgtgcccaatccgacgaaagcgggcacgacataaacaccgtcagcggaatccacacgctctgcgtatgtctcgctttctttcgaatcctggaacatccgcatgccgtctctcagccattggatggcagaacctgcgacaaagatgcttccttccagcgcatactcgacttttccgtctaatccccaggcgattgtcgtcagaaggccgtgatcagaagtgatggctttttctccggtattcatcagcataaagcagcctgtgccgtatgtgtttttccccatgccttcttcaaagcacgcctgaccgaacagcgcagactgctggtctccggccgctcccgcaatcggaatatttttaccgaagaaatgataatcaaccgttttcgcgtacacatgagaagacggtttcacttccggcagcatggatttcggcacgcctaaaatatcaagcagctcgtcatcccattttaattcatgaatattaaacatcagcgttcttgaagcgttggaataatccgttacgtgcgccgcgcctccggacattttccagatgagccatgaatcaatcgttccgaacagaagatttccgttttccgctttttcccgcgcgccttctacattgtcaagaatccatttgactttcgttcctgagaaataagggtcgatcaaaagtcccgttttttctctgaatgtatcattatatcctttttcacgaagctcttcgcaaatgccggatgtttgtctcgattgccacacaatcgcattgtataccggctttccggtatctttatcccatacgaccgtcgtttccctttggttcgtgatgccgatgccggcaatttgatcagcgctgattccggactcggaaatcacagtcgcgataacggcgagcaccgatccccagatttcgttcgcattgtgctccacccagcccggctgagggaaatgctgtgtgaattccttttgagcggaatgcacgatttttccttctttattaaaaagaatcgctcttgaacttgttgtgccttggtcaattgataaaatataggtctccatgatgccgctctcctttttaaatatattcagaatttgataatgttttctgtgattgagatttcttggtataaatatagagtatgaaaagcactacaaccattataacgcttacaaaccaaaagctaggtgtcacatttcctttaaacgcggcattgtaaaatacgccgccgaacgcaccgcccatgatcggaccgattacgggaatccaggcatatttccaatttgacggcccttttttcgggatcggcagaaaggcgtgagcgattctcggccccaaatcccgcgcagggttgatcgcatatccggtcgtccctccaagagaaatcccgatggcaacgatgaggaatccgacaatcagcgggttcagcccttttgtaaattcattcgctccgattgccaaaatgccgagcacaagcacaaacgtaccaatgacttcacttatcatattcccaaatgtatggggaatactcgggccggtcgagaaaacgcccagtttagcggccggatcatccgtcgccttccaatgcggcagataatgaaggtacacaacaaccgcaccgatcattgctccgatcatctgtcccgcaatataaacagggacgtctttccaaggaaagctgccttcaagcgcaaggcctatcgttaaagccggattcaagtgagcgccgctgatgctgccgacggcatatgccgccatggctactcccaatccccagccgaatacaataacaatccatccggattggtatgaaagcgatttctttaagttgactcccgcacaaacgccgccgccgaaaataacaagcagcattgtaccgattacttctccccaaaatgctgtcatcatcattcctcctaaatgacaaaatagcaggtttgacagagttatagagaataaaaaacccacaacaaaccgctttacgctttattgcttccgtaaagagctgttgtgggtctccgggtctccatcacatagtattaacctaggtctattgtaacaatgggtgtaagcggtgtcaatctttttttgtcatagaatgttcatatttagcccatagttcggtgtctgaagtcgtcacggccgtggctcctgcctgcaaggcgttttcaacgtcctgctccgtgcggatgaagccgccggcaaaaatcggaatccccgtcatttctttaatttctctgattaaagtcggaacgatgcccgggagaacctcgataaagtcaggcttatgctttccgacgaattccatgcttttttccatggcgctcgtatccaagagaaacagacgctggatcgcgtatattttcttttgtttcgctttgacgatgacggcggatctcgtcgaaatgatgcccgcgggccggatgtcctgacaaatgaactccgcaccgtattcgtcatgcttaatgccgtgaattaaatcgacgtgaaccatcagaagttttccgtgttttttcgcttcattcacgacaccttttaattgaccgaggtgtatatctaaaatgacgccgtataagaacggactctctaaaaatgcatcgaattgcttcatgttccggatagccggtagaatcttctggttgtgaaaactcatgttttactcctttactttaaaaatcaatgctcagcacgctttccttgacggtcgaaatgatgaaagagagctcctcgtcggacaggcaaaaaggcggtgacagctgaatgacattattatatcccgctacagtatcaccatttttcccgacaagcaggcctttttctctgcacgcggtgatgacgtgctgcacaagagcggcatcagcgggttccttcgtgattttgtccttgacgagctcaatgccggcaagaaggcctttgccccgtacatcgccgaccgccggatgttctttgagcggctcaagctcacggagcagccgttctccaagctcccgggagcgggcgatcagattttcgtcctccatcaattgcaggtttttcaaagcaagggcgcaggctgccggattgcctccgaatgtattcacgtgccggaagcggccgtacggctcaccgcccgaatacgcctcaaaaatctcccgttttactgccgttgccgacagcggcagataagcgctcgtaatgccttttgccattgtgacgatgtccggtgaaacgccgtaatgctgaaatccgaacggctctcccgtgcggccgaaaccgcaaatgacttcatcactgatcagaagcgcgccgtggcggcggcaaatgtcctctacctttgccatatacccgtccgggggcatcagtatccctccgcctgtaataatcggttccataataacgccggcaatcgtttcgcttaactcccacgtcatgatccggtcgatttcatgcgcgctttccaatgtgacggcatcgccgggattccgataaagatcaggcggcgccgcgtgcaaaaaaccttgtgagagcggctcatatttatattttctctgcgcctggccggtagcggcgagcgcccccatcgtattgccgtgatagcctctgtaccgggagatgaatttgaagcggctgtgatcgccgttttcaatgtggtattggcgggcaattttgaacgcggtttcatttgcttccgatccgctgttggaaaagaagattacataatcgccgccgagccattcattcagtttttccgcaagctcaatcgcgggttgatggctttgggtcagcggataataaggaagctccttcaattggctgtaagccgcatcggcaagctcctttctcccgtatccgatattgacgcaccacaatcctgacatgccgtccaaataccgtctgccgtcaatgtccgtaacccaggcgccttcccctttttggacgattatgctgtcatccggctccgcccctttcatcgcgtgccaaatcagctctttatccttttgtttgagtgactgatttttttgtacatgttccacaccgctcatctccctttcaatatcattgcactgtatcgaaagctgcccggcttctgacgccgattctcatggtgaagttttcctcttaataagaatataaaggcgcggcatgggcgagtcaataaagcggcggcaattaaaaaaacgctttctcccagaaagcgaaagggctacaagagcatatcccgaaaccggggccggtgcaagtgtttttataaaaaaacccgcccttaagcggggcgggcgtttttttatttcagatgcgtaatccggtaaatgtctttgcgccggtctttcagctggcgcacggttccgttttcacgctgccttcttaagatttcaaggtccacgtccccgatcacgaccatttcgatattcggattcgtttcaccgacgattccgtctctggcgaattcaaaatcagacggagcaaaaatggctgactgcgcgtattgaatatccatattttctgtttgcggcaggtttccgaccgtacctgagatgacggtgtaaatttggttttcaaccgctctcgcctgagagcagtaccttacgcgcaaatagccttggcggtcttcagtgcagaatggcgtaaagataattttcgccccttgatccgcggcaattctcgcaagctccggaaattcgatatcgtaacagatctgaatggcgatctttccgcagtccgtatcaaatacgcgcaccctgtctccggcgctgatgccccaccatttccgctcattcggcgtaatgtgaagcttatattgtttttcaatcgtgccgtcacgtctgaataagtaggcgatgttataaattttcccctcttcttcaacgaagtgggagccgccgataatgttcacattatatttcaccgcgagatctgtaaagaggctgatatagtcctcggtatattcggtaatcctctgaatggccagactcggagaacgctcttcgagaaatgacataagctgcgtcgtgaaaatctccgggaataccgcgaaatcagatctcgcatctgaagccacatcgacataatattcaacctgattggcaaattcctcgaaagaataaatctttttcatttcatattgaatgacgcagatgcgcaccggaaatgccgatttgtaatagcgctttgactgcggcagataatcgacattgttccattccattaatgtcgcatatttaatggacgcggtgtcatccgggagataattcggattgatccgcatgagcgtaaatccgttcatcagctggaaagaaagcaccgggtcataaatctgatggcgcgtcacctgttcgacataggctctcgccgtcatttcttccgcatacttatgataattcggaatccgcccgccgataatgatgcttttcagattcaatcgtctcgccaagtcttttctcgcctcatacagccggtgtccgattttcatccgcctgtattccgggtgaaccattacctcaatcccgtacagattcaatccgtccgggttgtggttcgtgatataaccgtcgtctgtaatgtcctgccacgtgtggcggtcatcatattcatcgaaattgatgatcaggcttgagcatgaaccgataatttccccttcatactcggcgcaaaactgaccttccggaaagtgcgcgagatggctgattaaatgctcaggctcccacggctccatccccggaaaacaatccttttgcagctcaataattttgttgatatctttctcttccatattccgtatgaccattttcttttcaaaacgggtcagatcaagtttctcagacaatgctgcttccccctgccggttcgttttgatcgttcaatcgctgtaagagtaattcaagttccatttccgccatcgattccagtctgtgatcgtattcttcaaataacagggcgctcgttaccttattcggcacgatgacacatttcatgccggcgcgtttggctgcgattgagccgttgaccgaatcctcaaaggcaagacattcagaaggttcaacgcctaaatgttccgcagctttcagatagagcttcggattgggcttcacttcttctacgtcgtcagccgtctgaatcacttcaaattcatcaaacaggcctaattccttcagatggcccgacacccatttaaaatctgagctggaagcgagccccaccttcaatcctaattcttttgccgcggctaaataagcctccactccgggacgcgccgtttccgtcttcatccgctgttcgaagcgcccgcgcctgatcgccgtcagttcatcatgatcgagctttcttcccagctgctcctctaaatatgcgaacggcttaaaccccgccgccgttccgatcacctttccccagacggataaaggcaatgttgaaccgtgttcctcaaacatttcctgcagcacttcatattcatgggtttctgtatctaaaattaacccgtcaaaatcaaagattaatgcttttatcaatggttacagctcctttagctaaacgtactgacctatgtatacactataccgtgaatttcttttgcattcaaaatgtaacattctcacggaaagaagagcctgcatgagtgcaagctctcttcatccgttactgtgtgttttgactggaaatattggaaagagccgctcccgcagactcatttgaacgctgatcgaccgctaagtctccaagcgcaacgatcccgaccagatgattttgatcgacaatgggaaggcggcggatttggtgttgggccatcagatgtgacgcctcttcaagactcatttccgggtttccggatacaacttgagaagacatcacgtgtgaaacaggtgtttggccgtcgcggccttgagccgttgttctcaatgcgatatcacggtctgtcagcattccttttaattcccctccgtcaacgacgggaattgctccgacattatgctggtgcatcagcgcagccgcttcctggatcgtttggttgggagaaacggtagccacgtgggtagtcattgattgtttgattgaactcattgtaaagcacccctttcgcattttattatgctcggggatttgactcattataaagggagttagaggaaagaaattgtggtatcatgtcaaggaagcaaaaaagagcctgtcaaaaggctctttatacccgtcagatcagccttctgtgaccgcaggcttctgatccggcccctgtctcgaaatcatcataggtaaagggaaaattcattccgcattcattcagcaaagcgcaatttttatcaaacagcgcccgctctttgacgtcatatacggggtgcggctttgacagcatgatatgtaccgtttgcagacaagccataatttgaaacgcttcttttaaagttccttggtaacgttggttttgtaaagacaatacgcccctttttttaaagcgctgaatttccagttcggagaaataaagaggaaagacattttgaaacaattcagaggaaagctcttgtatcgcgctttcttgtccgtcagtcgctgcgttcacaattctcacatcaatcacctttcttgccatgtgaatatccttaatctttatcaagaatagcatagaaaaaaacgcgaaagctaaggtaagtgtttcctattgaaacagccgctttccgcttgaaaaggagctttatgatatgaaacaaaatgaccgcggtctggaactcctgattacggaaaaacacgccggacaatggctgttttcagtcctgaaatctgaattccaggcgtcaaaacccgtgataacggaatggatgaaccaaaaaagcattcaggtgaatcggacatccccgaaaaacaacatcatactgaaaaccggagaccgcttattcattgatcttcaggaaaaaacgggttcttcggtaattcctgaatacggagagccggacattttatttgaggacagtcatatgctgattgcaaataagccggcgggaatgccgactcatccaaatgaagagggtcagaccggaaccctcagcaacctgatcgcttaccattttcaaatcaacggcgaacaagcgaaagtgcgccacgttcaccgtcttgaccgtgacacgtcaggcgcggtcgttttcgcgaaacaccgcctggcccatgcaatccttgaccgtcagctcgaaaccaaaacattaaaacgcacctatatcgccgcggcggaaggaaaagtcacgccgaaaaaaggcacggttgactcgccgatcggccgcgacaggtcacattccgtcagacggcgcgtctcacccggcggacaagccgccgtcacccattacaaagtgaagggctatcatcccggtgcgcagcttacattggcagagcttgaactggaaaccgggagaacacatcaaatcagggtgcatatggcaagcatcggccatccgttggcgggcgatgacctgtacggcggaagcagggcgctgtttcacaggcaggcgcttcacgccaaaaaagtcagtgtcgtccatccgatctcaggagaagaaatcgttgccgaggcgccgatgccggctgatctggctcattttaccgaaacgtatttttcttaaaccgggtcggcatatataatatatcgtttcggcgcatttccaatgtaagaaaacggatagcaagtggtcaggatcagttcctcccgcttgtgttgaagggtgatgacagacgtatcatcccggctgacgatttttgtacggctgattttataagaaaacgtgccgtaagacaaaatcacgttcagtctgtctccttttttcagttcgccggtccggcggaacaccgtgtccctgtggccggataacacaatttggccgtgatcgccaggataatagctgtccttataatgtccgacgccttttgctaaatcatctgcgtcagtcccttcgacgatcgggagctcagcgtcaatttcagggatttctaaaatgccgcttgcctcacccgtttcggggtgaaattcttttttgcgctgtgcctgcacagcgctttttgtttcgttcttttccaagacaggttctgttgctttttttgcttcttcaagcgattggttcgttttcatatgtgaatcaatgatcttccagcttccgtaacatgtgatgataacacctgcgatgatgacgagaagcggaatatgtttcagtttgttcatcgtgtgcgggttccccttttctttctgaaaagccaatatacgccggcacccgtgatcaccaggccggccaatgccgtctgatggctgcccgctgaagtatcaggcaatgggcggcctttttgtgtgccgctttcagtctgttctgtgctttgttccgaatctgcggcagacgccgtacgggattcgggaattgactgcactgtatcagatgctgcttcttttacgacaggacgttcaggttttttggtttgatcaggctgttctgctgcatccggttttttagcgggtttttccgtttgaggtttttctcctttatcaggcccggtgctgcccggtgtttccccgcttcccggctgattgccggtgtcatcaggtgtttcggcggctgatgccgtgcggatgcggccgtcggtttgataagaaatcggtgcggaaaagcttttgacatagtctactgtcgcttccaaatcctcaggccccgtcaccggattcttgccgagtttcccgatcggaccgtattttgcccccgctgccgtcgccataaattgattgactgttactgtatatcctttttcgggctgtatgtctgtaccgtccgccattttcacatccgccgcttgtccggtttccgggttccatgtataggaaaatccgctgatgctgtaatccggtccgtacaccggagaaatttgcgcgttgatgatctcccgcaaatcttttcctttgatttcaagcttcgtcagcacattgccgaacggctgtacattataaagatctccccatgtgatcggccctttttttatgccgtcccggatgcctcccccattcataagcgcaaaatcggatttcatcttcgctttcataccgtcggcaatcagatttccgagcgccgtgtcgccgtcatttgaatacccgcccgttatatcatgggccgcttccccgaccgcttcgctgataatcggtttcactttctcttcatatttgcttaatatgcctgccgcatccggatcaggcttgattttactttgatcgatatattggatttccgctgattttttcacgatatccttcgactctttatctagttcgagatcggcgattccgattgcttttccgtattcaaatgcctgcacgatcagcttgccgttgatttctccgtttacgactttatgattgtgcgcggcgaaaatcacgtcaatctctgagtctgttccgcttgcaagctttgcggattctcccgtgatggctgagccattttgttcagcagacatatgggcgagcacggcgattgctttaattccttttttcttcaggtctgcggcggcgtcattgacggcctttacctcatccgtaaacgtaatatttttaattccgtccgggatgaccatgcctgccgccgatctggttacaaccccgataaatgcgaccggaattccggaaacgtatttgatttcatacggcggcagaaaggactcccctgacttcaatttacagttggcgcagacgagcgggaaatcttggccgtcataaccgcttgtccccttaccgtccggatgatctcctccattgatgatccgtttaagctcattcgttccttcatcgaattcgtgattgccgacagttccgacatcaaaaccgatgtcttccatcaattctactgtcggttcatcctgaaaaagggctgacacgggagagctgcccccgatcatatcgcccgcatgcacgacaaaggcgtgttctttctcggctttcgcctttttaatgtacgcggtggcgtagtccatccgtccgaaagtgccatccggtttaccgtctccgttaaggtcaagctcatattgctgatcaatttttccgtgcagatcattcatgctgatgattctgagcgggatacggccggagtcttcagtctgccgttctttatacgctttatccgttccagcttcattcagtgatccggcttgtccgattgcttccgcatctttcacgctgaacatcataaaacaaaccgtcagcaaacagcacgaaagacgcaaacccctttttttcttcattcatttcccccctgtcttctaagaaatacgttagcttattttcttaaaaatcacatcacttttttgtaaagattgtcttcgctggcgcaaaatagtaaataatccccacgtaacgaaataagtcttgatgtataacggatcggcttttttcacatcttaaatgtgatttgacatgaaggaggaaaacaaccagtggaacagcagcagaatcagcagcagccgccagtaaatcaggggattccgggttcaccgcaagtgaatcacggaggacatgagcttttcgatatgcatgaagtgctggccggaacagtcggcgttttggatcaatttatgatgctcagacagtttatacaggatcagcagctggccgacattcttgaccgccagtatcaattcattctcggactctataatctgacggcagaatgctttaagaccggccaaaagccttctcaggaaacgtcgacatatatgatggaggaacagaaccaggccgtctacggtataaaaccgactcagccgaaaaaaccgaatcaatcattaaatgatgtcaaagatctcggaataagcggccatatgctcggcctgattaaagctcaagcttctctcttgacgatgagctcgcttgaaatgaccaatcccgtcacaagaagagtgctctccgcccaaattcagcaatatgtcgaaatggcgtatgaaatcttcttataccaaaacaaacacggttattatcaggttcctcagctcaatgcacaagatatgcagaccatgctgaattcatttgcgccggcgcagggacagccgcaaatgcctccgattaaaggacaaatgggacagcagcagcaaaacctccattaatgaaaaaaacggcgttggaaagctgactctccaatgccgttttctttttttcatatgcttttgtgaaatcatgttcaaattgtttcaggctttctttcgtagctgcttcaaagcctttttcaaaatcctgtgtttcggcggttttattgataatggttaagataatgccttctccgaatgtttcggttaaatcctttatcatatagaaactttgcaaataaacatccgtttcatattccatacgcgatttctgccattttcggtcggtcgttaattgatcaaacggcacgacggaaaatgcaatcggatcaatgaccacatcataatgcgcaacccactcgctcagcccctcatgaaaccaaagcggaaatacagacgtatccgtccccaattgccgcgctttttgatgaaatgcgtagtgtgtatattcatgtataatcaattgcttatacatgaaaacggccagctcatcttttttcaaaagctgttttttctcttctggcaagagccccatcatctgctcctgctctgaataaaaaccgactacatttttcaatcctgagtattgctccatttcagcttcatccgaaaagaaaatgagttcaagaggcgccgctcctttatagccgacaatgatttggttgatacgctttgcgtggtccagcgtaagcttggtcagatccaagagcggcttttcatccgctgtatagtaaatcgctgtatgtttgtaaatttctttattcatgtgttcagtcacttgttccttcgtcggaacagagcggctgttttggcctgacaggacgtacatcatacttactgaaacggctgaactgacagccaatatgacaaggactccgcacaggatcagagtgaatgccgcccgtttccccatgccgtcacgcaaacaagctcccctccccgatcctttaattttcatctcattctttactttatgctcagaagcgctgggtcgtgacggcagataaaataaaaaagccgcagcaaatgcggcttttccattcatttatttattggggtttgggaatacacgctgcaccatttggccgaattcatcaaacagtccggataccgggtggccgttttggattcgttttccgtagccttgcatacgttcaacgaagtccgggtttgctgatacatatacagtccggacatgtttatcggctgatttcaccttatcggtaatcttatttttcaaatggttggcgatggcgcctttttgtccgtttgtcagaacaacggctacataagcgctgtttccggcaacgatcacagtcgcatttttaacttcttttaaatcagtcaccttgtctgcggctttatcagccactctcaggttacggttgtcattgtgatcggtgttttggttatgacggttcactgtattcatatttgtcgcaccgtcgttaggtgtgttgcggtaatttacattctgggtgcggttgtcatttcgttttccttctccctggttccccatactgcaccctgcggtaatcagcatcggcagaagaagggcagaaataactgcttgtttttttatcatgtgaattcctcctttctcactttacgtataggtttttctattcggcgggatttatgcacgccgtttgcattctgagcggtttggataaatatcagaaggatagggaaaggtaagcgtaatcaattgaatgaggagggatttaacttgttcagacaaaaaagcggcatcagcccgacagcgctgctgatcggatcatcgattctgattgcagctttatcacccgaaatccgccggaaaatctccggaatggtttcaggccgaatgcagcataaagatggtacacactccatgcagcctgctgacctgattcaacaggctttcagcggggaatccggcggacagcagcacacggacaaagcacggcattcacaaacaggctccatgcagcctgccgagctgatcaaacaggctttcggcggggaatccggcggacagcagcacacggacaaagcacggcattcacaaacaggctccgtgcagcctgccgagctgatcaaacaggctttcggcggggaatccggcggacagcagcatgagcagacttcccgcaatcactccggctcatcccatacggacggacaggcagaccgcagtaaagaaacttcgccgaagcctcactataccgagccgattcacttcgaagaaagcgcggtaaatgttttaaatgacagcaccgtgatgaatatgctggaagaaattgaacccggaaatcattagaaacgaaaaaaatccttcattcgttcaacgatgaaggatttttcgttttagcgctatctgcttttttattaagcttcttcagcttcaatgacgattgaggaatcattgtacaccgcggtatcggtttccttcgtcattttacttgttaacagccctgcggtcatactgccgctgacatttaaggcggtacgccccatgtcaattaacggctcaattgaaatgagcagcccggcaagcgcgacaggcatgttcaaagcggataggacgagcagagccgcaaatgtcgcgccgccccccacgcctgctacaccgaatgaactgattgccacgatggcgatgacggagatgataaatcccggttcaaacgggttttgccctactgtcggcgcaatcatcatcgcgagcatcgccgggtaaatgccggcacagccgttttggccgatcgataaaccgaatgaaccggcgaagttcgcaattccttcagggacgcccatgcttttttgcgttttaatattaagcggcaaagcccctgcgcttgaacgggacgtaaacgcaaacaccatgacaggaaatgcttttttcacgtatgtgatcggatttaaaccgctgaacgtaatcagcagcaggtgaacgataaacatgacgataagcgcggcgtatgaagcgatcacaaacatccccagtttcgcaatgctgtcgatgtcgcttgtcgcgatcgtctttgtcataatcgccaataccccgtaaggcgtcaatcttaaaattaacgtcacgacgcgcataataatcgcgtataccgcatcgacaattccgctgaacgtcgcagcgtgctccggctgcttccgtttcacgcccagaaaagcgatgccgaggaaagcggcgaaaataacgactccgatggtggaagtcggtctggctcccgtgaaatcaagaaacggatttcccggcagaagctcaacgatttgctgaggcagcgttttggccgtcatatcctcagatttttgctgcagctcctggcctcttgataactcggtgcttccctggtcgatatggacggctttcagatcaaaagaaagcgccgaaacaattccgactgccgcggcaattgctgtcgtggcgatcaaaattccgatgatcagtccgctgattttcccgatgttatgggtcagtttcagcttcgtaaatgcgccgagaatagaaataaagactagcggcatgacgatcatctgaagcaatttgacataaccgccgccggcgatattaaaccaatcggccgtttgtgtcacgatatgtgatgccggcccgtaaatcaattgcagtgcaaaaccgaatacaatgcctagtccgagcgcggtaaagacacgtttagaaaaggaaacgtgttttttttgcatgacaaacagacctgctataagcaaaagcataataaaaacatgtaagactacaaataaattctccaaaacaggtaaacactcccttgctcattatcctttaacactatattatatcaattccgatcggtcaagtaaggattgacaatatatgtatttttattgatttttctcttttctttccaccctttctctagtaacttatataagggtgattgttatgctgaaggaactgtttcttaatttaacgattttaatcacatttaattatctgttcacccttctttttaaagagtcgctttcgtataaagaagaccgtccgatgtttcaattactgaaggggacggtctgcgggcttttaggggtttttctgattgctttcggcttttcttactccgattccatcattgatctcagaaatatccccattatcatcgccgctctttacggaggctgggtgtctacggcagccgcctttgcgattatcgtcgcaggccgtatcctgatcaatttcaatgcaagcgccattttttccatcgccgccgtcggggttattgcgatactttctgcggccgtcctcagaggaaaaaagccggatcataaaatggcgttcgttatgctgcttttttcaaatgttattttcaccttgacgctgctgtttcttatgcctgaacagcctgccggggccctcgtttattattggctcatttccatcttgggcggaatgctgtcactgtatatcatcaaacacgaagccgatgcccgcgttttgttcaagcaatacaagtttcaagcgaattatgattttctgacggggatttttaataagagaaaattcgaggaagtctcgcgcgttctgtacgatcggacgtctcaatccccctcgtctcagctcgcgcttatttatttggatattgatcactttaagcagatcaatgatcaatacggccattatgaaggggaccaagtgctgaaggaactgggggcgcgcctgaggttcttactcagcagttctcatacgtcagcccgcatcggcggggaagaatttgccgtgcttatgcccaattgcacgtatacaaaagggcttcacctcgcagaggaaatcaggcacacgattgacgcgaacccgattctgctgacgagcggagatacaattcccgtgaccgtttccctcggcatcgcgcattatccgacaaatacaccggaccctcagacattgcccctgatcgcggaccggatgctgtacaaagcgaaaacatcagggcgcaatcaagtgtgcagcactgaaaaaaaagaatgatcgcccgaagaggaaatcattctttcttttcagtgagaaagccgcccctcaggaaaacgggaatcaggctgccctcatattctttttcaatcaacgccgcggtatcatctgattgatacaaagacaggagtttttgcatccgttcatcatctttatcctcagctctgacggcgatcagatgaatatacgcttccttcatttgcgccgatcggatcagcgcgtccttctccgcatgaaatcctgcttttttcgcctcgctttgactgagaactgctgcgtcagcatgttccgccgcctgataggcgttcttttttgtttccgtttttaaggtcagatgcttcgggttgtccttgatcatatccgttgaccccgtaccgctgaatccctttttcaatgtaatcagtccggcctcctgcatgagaaaaagcgccctgccgaaggccgccgcttcatcaggcacggcaatgaccgctccgtccggtatatccttcagccgtttatgttgcttggaatacacccccagcgatgccgcatatgtcgttcctaaaggggccagcttctttttcacgtgaggcggcaaagatttaaaattagtaacggattgaaacgcattggcgtcgagatccccgccggcaagtgccaaatcggcctcagcataatccgaaaacgttaccaaagaaagctgcaatccttcctcaccggcttttttcgcgacaaactcccagatcgattgatcagattcattgattccgatagtaatggtccggttcccgtcaggataatcgcatgaagtaagtgacatgatcaaaatgaaaagaaacagactgtttataagccgcagattcaagttgacctactccctatctatttttatgtacagaagctgcaccatggtattcgggctcatgattacatacaataccgattaaaaaaagggttgtcaattgcttccttaagaggctgcaaagcggtttttatcagctgcaaatgggctgttctggtctcaaatcagatttccgtatcagagcgttttcctcttaaaacatgttatttcgaaaaaagttacatttagcagttgttttttcttcggattactggtagagtaaaggtaattatttttgttcgaactatctttaagaagaaagttttgtaagagttttcgtcttggaagtttgttttagagcaagaatagtgaatttaagcgtttgtcgctttaggaggaaatttcatgttagaaggtaaagtaaaatggttcaactctgaaaaaggattcggattcatcgaagtagaaggtcaagacgatgtattcgttcacttctctgctattcaaggcgaaggcttcaaaactttagaagaaggccaatctgtttctttcgaaatcgttgaaggaaaccgcggaccacaagctgctaacgtaacaaaagcataaattgtttaaaaaaacctgccggtgtacgccggcaggtttttttcatctaaaacgaaaagctgttttgcaaaggcaaaacagcttttttatatcaggtggcaatatcccgttttaagaagacgccgaatgcaagcgccagaaaaataacgaagtaaatcacaagcatcacaaccgaaaatgtcatcgtcatcccctctactaaaggagtcccgttcatatattgcgacaaatccgtgttcgcaaataaaatatatttggtccattcaaatttcgcagcaagaaataccgtcgccgtgttccccataaccaatagaaaaatagaaaatccgaccgctaatgaactgttccggaataccgcagacagcataaacgccatcgtcgcaagcataaaagcggagacagattcatagacatatgttttagcgaggaaagcgatgatattttgctcaaaaacatggccgtctttgtatacgagatgaacatcagccgcagtatctccgcctgtaccgaaaaagaccaatcccaacagagcggagccggcaaataaaatcacaagcatcagcagtccgaacagcagcactgtcatatatttagaaagcaaaatctgaaaacggctgagcggacggatggccagcagcttgatcgtcccccagttgaactcattcgccacgatgcctgcggcaatgataatcgtaaacagcccggtcaaaacagtcatcatcgaagaatcagatacgtatgaccacactgtgtaccctgtatcctcggggatgttatgatccatacggtattgatttatcgcgacattctgtttcaggttatcaatgagcgtctgatttccggtttccttcatctgctgtttcatttctttgttttcagcctggagctcctgtttccaattcggattggcttcgttcgaggtgaaatggtttgacagaagcgcaaaaccgatcatcgaaacgcctaaaatcacaatcatagcccacgtgccgacgcggctgaaaattttaatccattcattatagatcagcttaaacatattgaacctcctctttcgtcccgccggtaatttccaagaaacggtcttccaaagattttgtcatgattttcacttcatataagcggatgttttcacggacgagcagtgatatcacatcaggcacttcctgtttggacagctggatctcaatgccgtttgtcttcttcacacagtcaaactgactcaaaacggcaagagcctcttctctttgttcaatatggaagaagtatgtatctttatcctcttttccttcatcccttactttttgaatatcgacaagctctcctttttgcagaatgccgattcgatcgcacattagctccatttctgacagaagatggcttgagacgatgacagccattcctttttcacgtgtcagctttttcagatggtccctgatttctctgatgccggcgggatcgaggccgtttgtcggctcatccagaatcagcaccttaggattatgcagcaggctttgggcgaggccgagacgctgtctcattccgagagagtaggtttttactttgtcatgtattctgtcctgcaacccgacgagctcgatgacctcatctattttttctttcgtaacgccttttaccatccttgcgtactgctgtaaatttttatagccgctcaggaatttgtacagctccgggttttccacgatggctccgacgtgcctgaccgcttttgcatagtttttcgtaatggattccccgcagattacgatgtctcccttagacagtttcattaatccgaccatcattctgatcgtagtggttttccccgctccgttcggccctaaaaatccaaacacttcgcccgcccggacggagaagctcagatcatgaataatcgttcgtccttttatcgttttctttacctgttgcagttctaataccgtttccaattagaatcccccttctatttcgtgcgcctgcatgacgtttctataccattgcagcacggacattccttcctgttcccgaatttcttcgacctcgcgccgttcagcgattttcccttttatgaaaaccatcacttcgtctaacagcgtctcaatctcgccgatctcatgcgtggcgatgacgacgatctgactgtcaaaatcaatataagatacgagactgttgacaatcgactccctgaccgccggatcaagacctgaaaacggctcatccagcagaatgaccgatgcttttctcgacagggccaaaacgattttcagcctgccccggctgcctttggacagctcttttaacttctgcttcgctgaaagattcatttccgctaataggttatgtgctttttccagctgaaaatccgggaattgcgaatgataaaacgtgagcatatcaccgacggtcgtccgggcggaaaacatatcatgttcggttaaataagccgtacgaaacagcatgttcctgcttactttgcactctcccatccggacggcgcccgatgtcggaaaagcaagccctgcaagcattttaagcgttgttgatttaccgcttccgttcggccctaaaattccgtagattttacccggagacaatgaaaatgatacatcgctgaccgcgatcctgcggccgtatttttttgttacgcgttcaaaatcaagattcatcgtttgcttcctccgcatattgtttgatcccctcgagcatttcctcaggagataaccccagctccgccatttcctgaataaagcgtttgaaaacgtcttttgtcagcctgtctttcagctctgctttcagatcggatctttccgctataaaggttccctgtcctcttctcgtctccacgatccccagcctttccatttcactgtacgttctttgtatcgtgttcggattcactttcatctgtacggccatctcccttacggacggcagtttgtcccccggtgaaagctcacttcggatcagccggtaatatatacgatcggcaatctgcagataaatgggcttggatgactgaaattcattctccatcattacacctcaacctttcgattcagcagtatagaggccagcgcgagacagagcgctgcaagcacgatcactgccagaaagctgaaaagcgaaatgtggacggctttcagctccatcgtccatccggacaatttcgtataatgaaaatgaaaattcgcatacacttttaccggccataaatcatgttgagatgaagtgaaaggcgtaatgattttatcgtcaatataggtccagacaaacgcaagcacgatgcagatcccccaacggaggacgggaaaatgttttaatgagtgaaaaacagtccaaaatacggccacgatcacagataagtacgctgaactgatcagcaggtaagcattcagcccggttaatgtgccggccaggggaatggtgtgttccagcactccttttgcagaaagcatccggtacatccaaatgccgtaacccgtcagcgccagctgcccgatcaactgatacagcagtgaggccgtcagcttggaagccagcagataaaatcccccattcggattgtaaagccacagctggttttttccttctttatgaaggtgataatacataaaaagcggcgctacaagaaattgaaaaaaccccattgccgtaaaaaagccgaaaatgacgagcggttctttctgacgggcagcgatgacgtgggctgaaaacgcccagcaaatcatgccgcaaagccacaccgcgagccaaatccatgaaactttcgcatcttttttcagcaaacctaaaaacgatgtcattctttctctctccattcggatcaagtgtatgagtaacatagtacactagatcatcacgtattacaatatcttcaataaaaaaaagacaaatccgctcttacgcggatttgccttttcaattacttctttttgttttttaaggagagcagcgcatcacgatagctgctatcctgcattttgccgccgctatcaggatcgtttggttcctgatccgtctcagaagtcttaaacttctgaagcgcctgacggtacacatcatcgcccattgtattctttttctcacggggagattcagattttacaacgacgggagcatgctcggctgagcgctcctcggccggatcatgcttttccggctgttcggctgtagtgccgatcgcttctctcttttcttctttgacatcctgtcctgcagaagtgctgcggacattgaaggtgataagaagtgcaatcacaatgacagcagcaataaccgctataataatggccatataaccctctccttactgtcgtccggcagttagattaccagtgacctggctgacacgtctgccaagcgcacggcctaattgaaggccttcttccgtcatcagcacatcgctgtcaaccgggcatgtgacgcccgcgccgtagtaagagccgtacagcgcgttttcaggaacgttgccgggaagaccgacaacaatcatgccttggtgaaacataggagtgatcagattgtgcatggtcatttctaatccgccgtgtgttgtcgccgtcgtacagaatacagcgccgactttatcaatcagctcgccttcagcccacagatagccgagtctgtcgatccacgcttttaagcctgaactgatggtgccaaagtgtcccgggcatccccagataatggcatccatgtctttcagcttgcggatgtctgcttgatcgacatggtcgatcaggacttcagcctcagcgttttctcgtgcgccctcggcaatggcttcagcaagatgttttgtgtgttcgccttcactatcgtacactacgtaaattttcattcaggaaacctcccattcagatgattaagattccttcacttctttaggggccggaagcaatgacagctcctcttttttcttcgcccgctgtttgtctttccgcacgtcacgcaagaacagactcaggactacgccgataaccgcaaagatcgtcgcccacataaacgcgtcattaatccccataacgttggaattgagtgaagctgttttgtagagatatgaataaacggtttgtttcgccgcatcaagcgacatgttcatgttgaccattaaattcgaaaccgcgctttggaacgactgcatgaagcttggatcagccgtgcttgttttatccgcaatctgcgaataatgcattgtcgtacggttcgtataaatcgttgtgatcaaacttgttccgattgatccgctgatctggcggagcgtgttgctcatcgccgtgccgtggctgttcaaccgtgccggaagctggttcattccggctgtcataacaggcatcattaacagtgacataccgaatgcgcggatggcatagacaagcatgatgtgcgtgtaaggtgtgtcaattgtcaattttgtgtactggaatgtcgttgcgaccgtgatgaccagcccgataatcgcaagcggtctcggaccaattttgtcaaacagaataccggaaatcggcgacatgatcagcatgacaatcgcgcccggcaatagcaagagacccgattgcagcgccgtaaagccgactaagttctgcaggtaaatcggaagcaggaacattcctgtgtaaagcgcaacggtaataatgatattaatgacactggaaagtgagaaaatatcatatttaaatacccggaagtcaagcatcggtttttcagagcgcaattgctgaatgacaaacgcggcaatcgcgatgacaccgacaatgacggtagacagcacgatcggatctccccagccgtcgctgcccgcttcactgactccgtaaagcaatgaggcgaatccgacaatagatagaatcgcacccaagctgtcgagtttgattttttgcggttccaccaagttcttaaagaggaaaaacgctatgataataacgattgccccgatcggaacaaggccgtagaacataatgcgccatgtgtaatgctcgatgatccagccggatagagtcggtccgaccgccggagcaaacatcatcgcaagaccgaaaatccccattcctttccccctgctttcaggcgggaagataagcagaatggttgtcatgaccagcggctgcaggataccgccgccgaccgcctgaattaaccggccgatcagcatggttgagaagttaggcgcgattccgcagactaacgttcccgctgtaaaacagaacatggctacgagaaagaggcttctctgtccgaaccgggtgattaagaacgcagataacggaatcaaaacaccgttgaccagcatgtatccggtcgtaagccactgaatcgtcgtcgcactcacaccgaactcggtcattaagtgcggcatcgccacgttaagaagcgtttggttcaagatcgccaggaataacccggccataagcacaataagcaatgttttaggactttttacttgattatctgatttagccacctaagacaacctcccttcatggtttgatgactgatctgtattattcagagatttttacagatgcgttcataccaggaagcaccttgtcagatgggttgctgagtgaaattttaacaggaactttttgcgttactttagtgtagttgccgcttgagtttgaagaaggcagcatatcaaatgttgaatttgtcgcataaccgatttcttctactgttccgtcaaatgttgtattaggatcgccgtcaacaattacgtctactttgtttcctacttcaatgtctctaatgtctgtttctttaatgtttgcagtgatgtaaaggtgtttcatgtcaatttcctgggcaattgtcgtaccggcttgcaccatttggccgtttttcacttcgtttttcacgattgttccatccatgatggcttttacgtcagcattttgctgtcctttaatttttgcaaccacgtcgtttttgcttacttctttcccctcatcaaggttccagtcagttactttacccgcagcaggagctgtgatagcagccatgtcgccggcaactttcgcttcatcggtttttacatagtgtgtgctttgataatagtagtaagcacctccgcctataattgcaagaacaacaatcaaaccgataatgttggtcagaattaaacgtcctctgttcattttgttttctcctttcgtttcttcctctatcattttgtggaatgatgataaaaatatgtggggatttttttattttccgtttttcactgcacagccgtttgcaagcttcgttaaactttccgcaagcttgcgcaggtactgcagttcagcggtattgagctgccggtataagaccgccgctttttcggcatattgaacagcagctttctttagaagttcttccccctcttcggttaactgaatcataacaacacgccggtcgtcgtgatagtcgctccgaaccattaggcggcgcttatacagaatatcggtcattctcgtgacagacgccggtttcagatcaagcgacaaagccagccttgaaagctgcgtgcttttgctcttatgtattttgaacatcagcagatactgcagcactgtaatatcaaaaggttcaagcactgtctccagaatcattttctgctttttgtaaatcgatctggaagtatcaaacagttgttcaaaactgagcaaagcgagctctgattcaatcaccgtattttcacctcattcccttaataatagttcacaagataaaatattaataaatgaaagaaggtttgtaaagagaaaagtttcattttttaaggattttttttatgccgttttttctctttatttttaatttaaaaaagccgggtgaagaaccgcggccgcacgattcttcactcggctttatatttaatacgatgctttgcttataccggcttcctcatttttaaaaaagcttttcagcgcttgaaatacgtccgatttctgtttcaggatgtagtatttaaatttatcatctttgacatttttataggcggacatgagggtggaatgcctgttatattgattgacctcaccgtaacagaacagattcgattttttcatgatgtcattgacgagctttacgcaccgggcgttatccgaagtcaggttatctccgtctgaaaaatgaaacggatagatgttgtagcgggcggggtcatatttttcatcaattaattcaagagacttccggtaaacggaggaacagatggtgcctccgctctcgcctttcgagaaaaaatcttcttccgacacaaccttcgcttccgtatggtgggcgataaattcgatatcaaccgtttcatactttgtccgtaaaaatcgtgtcatccaaaaaaagaaactcctcgccatatacttttcccatacgcccatcgaaccgcttgtatccatcatggctaaaacgacagctttcgattccggcttcgtcacatcattccatgttttgtatttcagatcttccggataaatagggtaaaacgacggcttgcctgtcatggcgtttcgtttataggccgacagcatcgtccttttcttatcgatattccctgtcagcccggttttccggatatcattgaactcgatatcggtatggacgatattgtccctttccttttgctgcagattcggcagttctaattcctgaaacagcgcttcttccagatccatcaatgaaacttccgcttcataataatcctcgcctgcctgatcgcctgctccctggccttttccggcgccctgctttttatctgcgccgtctcttgcgacgacatcgccgacttcgctgtcgccgtcgccttggccgacatgtttatttttatcatagttataacggattttatattcatcaagcgaacgaatcgggattttcacaacatcttttccgttggacataataatgctttcctcagtgacaaggtccggaaggttgttttttatcgcttcctgcactttcttttggtggcgctgctggtcgtcaaagcctttgcgatggagggaccagtcttcctctgaaatcaaaaaatttccgctgtcattacgggacatgaattcccctccttaaccgttatggtcgttttacatgtgtattccggcttggtcctgtttatgaaacaagtccggcgaaaagatttatttttatcttatgccggccggactctccaattgacaaacaattgcgaaaaacagacaaaagaacccgtccttttacagacgggcctctcaatgaaatcaaatatcagcggtttaacaagcttccgacatacttcagcagttcattagcgctagtcgaattatagccgtgttcatctattaaccttgccactacctcattgacctttttaagctgctgttcatccggcgttttggtggaggtcgtaattttcactacatcttttaagtctgcgaacagctttttctgaatcgcttcgcggagtctttcgtgcgaattatagtcaaagcgttttccttttcttgcataggcggatatgcggattaagatttcttcgcggaacgcttttttggcgttttctgaaatgccgatctgctcttcaatggatctcatcagtttttcgtcaggattcatttcttcacccgtcagcggatcgcgaagcttatttttattgcagtacgcttccacattatctaaataattgtccatgagagttttcgcggattcttcatatgaataaacgaacgccttctgcacttcctttttggcgatgtcatcgtactctttcctggcggcggaaataaaattcatataccgctctttgtcctcggcggagatggacggatgctggtcgagtccttcttttaaggaacgcagcacgtcaagcgaattgatggattccatattttttctgataatcgttgaggaaatgcggttgatgacatagcgcgggtcgataccgctcattccttcatcatggaattccttcttcatatcctccagatcaacggaattgtaaccttcaacgctttctccgtcatagagcctcatttttttgacgagatcaatatcagagcggttcggttccttcagccgggtcaaaatagaaaacatcgcggccacttttaatgtatggggggcgatgtgtacgtcagaaacatcactttcagaaatcattttttcataaatccgttcttcctctgacacctttaaattataaggaacaggcatcacgatgatcctggagtgaagggcttcgtttttcttattggcaataaacgagcggtactccgtttcgttcgtatgcgcaacaaccaattcgtcggctgagatgagcgcaaaccgtccggctttgaaattcccttcctgcgtgagtgacagaaggtgccacagaaatttttcatcgcatttcagcatttcctgaaattccatcattccgcggttcgctttatttaattcaccgtcaaaccgataagcgcgcggatctgattccgaaccgtattcggcaatcgtagaaaaatcaatgctccccgtcaaatcggcgatatcctgtgatttcgggtcagacgggctgaaggttccgattccggtacgtttatcctccgagaagaatatacgttcaactttaacatcctcaattctgccgccgtattcttcttcaagccgcatgacattaagcggagaaaggctgccctcaattctgatgccgtattctctgtagaagtcgtcgcgcagatgatggggaatgagatggagaggatcttcatgcatcgggcagcctttaatggcgtaaacagcgccgttatctgtcaatgagtaggcttcaagcccttttttcagcatggtgacaagagttgactttccgccgctgacaggtcccatcaatagtaaaatccgttttcttacatcgagccgcttggcagccgggtgaaagtattcctccacgagccgttccagagattcctcaaggccgaacagctccctcgagaaaaagctgtatgtctttttcccgtcatcctcctcgattccgctgtcttttatcatattaaaaacgcgagaatgagcagactgcgcgaccaatggattttcttttatgatctccaaataatcagcgaacgtcccttcccatttgagacgctgctcttcctctctgtacttttcaattttctttaatatatccataagaacctcctctatcatggttaatgcactagaaataaggtactttgttacaatctatgcggtgacgtgataatacatgcttttcgtttcttaaaaataaagacgttataaggccgtcattgacaagggtccggtgcaccgttcataatgaaagaaatacagtttcatccagactcggacatcaaatggaaaagcaaagaggaggagacatgatgaaaacgatcattttacttggggtcattctcacttttttagtatccatttttactgcgggttacgacagcaaacctgaaaacaaataacggcaaaagggtgctctttatgaagagcaccctttcctgtacaacataacaatgtttcatatttgaatatgttcttggacagttgatttttcatgagacttacagcttgtttgatactcgatttttccgattttgcagcccgggccgatttccacacgcttccctctgacgatgtccgcttccgtggattcgaggtaaattgcgtctccttcgatcaattcagcagaaagcatgccggctttccgtttaagaaaaccgggtttccgtctgacggtaatcgatgtgccgccgatttctttcacgcggcttcggtcataacgcaaatggatgtttacgtcccctgcgtttaacaatcccgccacattgatacatcctgttacatgaagcagctccgtctcgcaatcgccgccgacggtgagactgccttttatatgacactgttctcccgcggccccgccgccaatttcagcaagtcccttcagcctcatcctggcaaaacgcatggagccgccgactttcaatgtgccgatcacatttgctgaatgtgctgataaatctcctgcaacttcatgctctccgaaaattttcagcctgctgatctcggcatctccgagaaaaagtcccgtgccgaatatccggcagcgttcgctttgaagtccttcgccgacagttccttcccctttaatgcttacattttggtaggaaccgccggaagcgtgtccggctccgtacatttttaaatgactcaatttttttgtcgtttccattgcagctcctcctatcgtttcacgactttgttaaccaaagcggtaggatcacatgtaaaatcgccgctgtattccaccgtcccaatggtgcagcccgcgccgatccgcacatgatttccgcggactgtcttcgcgttcgtgtccgccaattcaatgatgtcaccctcaatcagctctgctgtcagcaccggggccggcatcagcttaaaacgcgtaagcacgctctttctgctcatcactttcaaatggcggcagccgatttctttcacatgactttctcccgcagccagcttcatactgacttcatcggcattcagcaggccgccgatcttgcatttgccttccgaacggaatgtctctgtctcgcaatcaccttcaatcccggctttcccggatatgaaaatatcatcagctttcacaccgccgccgaaagatgaaaatcccgcgacgttcagccgctccgttttgacatcacctttaatgacacccgttccgttgatacggatggattcagcttcggcactgccggaaattttccccgaaccgctgattgtcagtgtttgcgtcttgacatgtccgtctgtttttccgctgccgttaaacaaaaggctcgtgcactccacatcacctgacaccgtgccgctcccgttgatctccactgtatgaaaacggcctccttttgaacttcccgaaccgttaatgattaatttatctgttacttccattgatggtcctcctgcatccatttcgtttttaattcttccgatgccgcagcaagcgccacccgttcaaccactttgacagtcggttcaaataaaatatgttccgcgtctgcgatgaagcacgtcgttacgccgagctttcggagcatgacaagctccgtattcgctttcagctcggaagcctcatacgtcttcagcacccccgccgccaattttccttcctcaaggctgatattgcccgattgcaaaagcccttcaagcacatataaagacagcagcgcgcgggacgtgaatgtcacgccgtcttcgccataaacttgcagcgcggcttttgaaatcagtcccttttgaagcagttccgcagacgttatattgacatcagtcatttgcggagacagcatttctctcatttcatccagagacagattttctttcatttcctgtatttttgagatgcgttttaatatttccgctctcggaaaaaatgtttcctggcctgtaaacgtcgattttcggataaaccattcttcaggaattaaatttttccgtttccaccggtacagctgcccgtatgaaattgatgtttcttccagcaattcttttttagaaatcagttgttcctccatgaatccagctccttcgatgaacgtattgtaacataacactgttacgttgttaagcccggaaatataaaaatgccgtaaaccgctgctgcccgtcttttttattcaataaaaaaacgcccggatgcgggcgttttttctcacgtcaaatctctgtaattttgctggcgcagcgcttcatatacaagaatcgcggccgtgttggacagatttaatgatctcacatgctcggtcatcggcagacgcaggcagcggtccatattgttttcgatcaattctttcggaagtccgctcgtttctctgccgaatacgaagaaaaagtcttcctccgtatttgagtaatcaaatgatgtgtgcggcttttgaccgaattttgtaatgaagaaaaactttccgttttcatatgcttcaaataactcttccaatgaatcatgatatacgacgttgacgaactcccaataatcgagtccggcgcgcttcagcattttatcatcggttgagaatccgagcgggcggatcaaatgaagcgttgtgtctgttgccgcacaagtacgtgcgatatttcccgtattggccgggatttcgggttgatataaaacgacatgtaatgccacgatgttcacctctgttttttattccgcccaccattatatcattaattactcttttgtcgtatcatccgtaatatgaaaaaacgcatatctgatggaaggagtatacgccgttgaatcctcatatgaccaatatctcatcctgctgtcatacgtttgggcattgacgagcggcatattgcttttatcttttgcgaccacgatcgccgtatgattaaaacggccgtctccttcaaaatcatagcaaatgatatctccgggcatcagttcttcagctcttgatacttgcactgcgcgaagccctgccttggattgggccagatacatcttcatcgaatgcgcgaccgtccagctgtagctccacgagcttgccttcatccaccagcctgagcctctgttcggatgcccccgcatcggtgcttttccggcatgtaaacattgggaaataaaattggtgcaattatcgctgaaatttttataagcgggatttcgtttattccaaaacttctccgcgtactgcacggcagccagacggtcgtattgaaacgcccgcccgaaatcttcccgttcactccgctcatattcaattacgctgtttccgtcagaaaatccagccggttttttctttacttcccggtctttaatcaaaagctcatcatagagaaatgcagtccgttcctcaatctgctcttctaagtaaaggtgtccgtcatgctccttgcacaaatattcgaaatgaatcgtgtacatgacacataacgtgccgtcgtcctcaagactgcttttgacaatgacggcttttgccttcgctttcacgatatcaactttccgtttttcaaacagctctttttttctcgtcaggacctcaagatcgccggcctgcccattctgcctcatctcagttccgttgattaaataatgaagccgggcctccgctaaatcttcaataatatgcttcaagcgctccacccaccatacgattttataaagaaaaaacacttgaactccggccaagtgctttttctctatacatatgtcaggaccggccggttttagtcttctcagaaaccgataacagctccagtcccttttcaatttcccgtatggcgtcttcatcctgctccttttgaagcgctttttctaattcctccgcataatcaggatcaccgattttcccgatggcccaggcggccgtacccctgatgacggggcgcggatcttggtgcatcaaggccgttaattccggaagagacgaggcatctttaaaatgagccaaagctaaaatcgcattccgctgtatcggcttcttgccgcgccatgatcccgatacatgtccgaatttttctttgaattcgcggttgcttatggtcaaaagcggctttaacagcggctttgcgatttccggatcaggctccatctgcggatgaagatgaaaatctttccccttattaatcggacagaccgtctggcacgtgtcacagccatacagacggtttccgattttcgtgcggaactcatccggcaaaaatccctttgtctgggtcaggaacgaaatacagcgctgggcgttaagctgtccgggattgacgagggcgccggtcggacacgcgtctagacattttgtgcacgtaccgcacatatcttcaatcggcacatccggttcaaagggcagattggtgatcatttcagccagatagacgtaagaaccgtattcaggcgtggtgatcatgcagtttttggcgctgaagccgattcccgcccgttcagccacggccctgtcggacaattctcctgtatccaccattgactttgtgcggatatcctcatgtttgctttggagaaaattctccagcagatcaagcttttcccgcagcacatcatgataatccttcccccaggaagctctgcaaaaaatgccgcgccgcccgtccctcgtgctcctcggcgcatctttcattttggaaggataagcaagggcgatggcgacgattgatttggctttcgggagaagcaaagacggagtaacccgtttttcaatatccggctcttcaaaaccggataaatagccgagtgattcctgaagaatcagccggtcccgcagactgtcgaacgtatcagccgttgtaaacccgattttgtcaactccgatgcttttggcgtattcgattaattcctctttcagtttatgaatattcattttttgcacagcctcctttctttgtgatcaggctcccgcacgggtataatagagttttatcatcccgaaatggagtgaacacacttgaacatcagtttagatccacttattgctgaacgggtgccggggatcaaagcggcagccgtcttatatgaacagatcgaagtcgggcctgctccgcaaatgctgaaaggccgcctccgtttatttcaagaatctctttactttgattatgctgacggcggtatagatgagcagccttttgttaaagagtgggcgtgtataatggaacagctcagtcccgccttttcaggacaaaaaacgccgatggagcttatgctcggcgatatttcccgggaacgattcattgaaagtgtgaattcagcccatgataccatactttttttctccttgaaatattcattgcctatcatggcgtatgacgccgcagaaatagatgaaccgatttcgattacaatcggagaaaaagaacacgtacttgctttctccgactctggcggcattttcggcggccttaccggacatatcaacacccgccctgtaacaatcggcacaaagaaaatgctgcagctgatctttttcccgccttcatttcatgccgacgcggcggatgagctgctatcatctttaaccaaaatgtttgaacaaattcacggaggcacgcataccgtctcttggctttcataaaaagacacgccttcgtgtcttttttcacataaaaaaacgcaatacttcgtttatcagagaaacgaaacactgcgttaataacgtatgtatggagcgggtgatgagaatcgaactcacgacatcagcttggaaggctgaggttttaccactaaactacacccgcatcaaagttttttgtcagtaccgatttgatgtttctaatattacatgtatatttttttttcgtcaagggaatgttaaaaaatttgtcgaaaaaaattcttttttcgtccacatgttaagttaggtttacattttgttaagaatctcatacaatataaaaaagaagaaaacttgaggtacgccctgatgatgaaaaataaagtaaaagagctgagagccagattcggctattctcaggaaacgctcggaaaagaagccggagccaccagacagacgattgcagcgattgaaaaaggagattatgtgccttcactcttattggcgcttaacatctgccgggctttctccctgccgatggaggaagttttctggctggaggaggagaaaaaatgagtttgaaaagaaaagcgtgttttcaccttgcactctacggattggcctgctggacgcttatttcctttatggaagcggcgccgcggatcgctcagtttttccaaacggaggggagcggtgcatttgagctgaatatcactccgtttctgctgtttaccgtttgtgccgcattgtatatctatgccgaaaagaaaaaacgaaacggcaaaaagcataggctagtgcccgatgaatttgaggaacaggatgaaagagaacgaatgatgacggctaaagcttgccgttcctcgtatatcgccgtttacttctcattgccggccgcagccgttctgcttttgttttatccgctgattcagccgcatctacctttttttccgattcttttgattttcattctgatgatgattcagcatttggcttatgttttcacttttcataagcacggcaaaaactccggttcatgacagatccggagttttttatgttaccagctcgcttttttcaccccgggaacccggcctttatgggccagctccctgaatgcgattctggacagtttaaattttctcatatatccgcggggccgccccgtcaccgtacagcggttatgaagcctggccggagcagaatcacgcggcagtttgctcagcgcttcccagtcgccttttgcctttaattctcttcggatgtccgcatattgttcaacaagcttctgccgcttgagctctttgattacttttgatttttttgccatttcagcactcctaacaaatcgtaataattacgttttgtatcatatcatccagatgagcatcgtgcaagctaagcgcttaaaaaggcgggtgaatacccgccttcactgccggcatttccccggaaatgaatccgcagaaagcgcccgccgtcaatgatccgccttgcgacgtcatcagactgtcgctttatttcctcttgcaaaatggtcgtttcccattgcttcacccactctgcgctcaagcttgttagtccgttcattctgaaacggcagaagcggaaacacgagttcagccagataataagcttcttccagatgcggatagcctgaaaagataaacgactcaatgccgagtgcctgatactctaaaattcgatcagcgacagtctgcggatcaccgacaagcgccgtgcccgctccgcctctgaccagtccgatgccggcccagagattcgggctgatctcaagcttcgagcggtcaccgttatgaagatcggccatccgtttttgtcccgatgaatcagcgcgccggagcgcagcctgcgctttcgcaattgtctcttcgtctaagtggctgattaatcgttcagccgcttcccatgcctcttcctcagtctcccggacaatcacgtgaagtctgatgccaaaacgcatcgtccttccttccttggcagcctgttttttaacggtttcaatcttttcttttacctgctccggcggctctccccatgttaaatagacatctgtatgtttcgcagcagcctcaattcccgcctgtgatgaaccgccgaaatataatggcggatgcggagactgttttggcgggaacaggaggttgctgttttccaccttgatatggtccccttcatatgtcaccgtttcgccccgcatgagtccgcgccagacggttaaaaattcttcagtcgccttataacgttcatcgtggctgataaacatgccgtctcccgccagttcataaggatctccgcccgctacgacatttacgagcaaacggccgtctgacagccggtccattgtcgacgccattctcgcggcgacagacggctgcatcagtcccggccggaccgccactaaaaatttcaagtcactcgtttcccccgctaaagcggcagccgtcagccacgggtcttcgcatgatctccccgtcggcagcagaacccccgtatacccgagtctgtccgccgcctgtgccacttgcttaaaataaagatgatccgccgttctccctcccgtttgcgtccctaaataccggccgtcaccatgcgtcggaataaaccaaagaatctccatatgaatctctccttttttaataggttacccttcataactgttccgccattttaatagtttccgttcgagcattctgaccaatgcatctgtcagcttgccgacagccgcaaaaatgataatgccgacaaacaccttatttgtctgtgaaaattgtctggcatccataatcatataaccgacgccctcgctcgatcccatcagttccgccaccacgagaccgagccacgcaatgcctagggagagcctgatgccgagcaggatattcgggagagatgccggaagaattaatttcgtcatctgctgataccaattaaattccagcacccgcgcgacgtcaaacagcttcgcgtccacactgcggattccgagaaacgtattaatgtatacgggaaaaaaagcccccaatgcgatcagcagaattttagatgtctcatcaaatccgaaccacaaaatgaacagaggagtcacggccaagtgcggaaccgtcctgagcatttgcagagacggatcaaggtatgcttccgtccgctttgaaaaaccgaccagcagcccggaaacaagtccgaggcccgcgccaagcagaaatccggcagccgcccggtataaactgatctctaaatgaccccaaagctcacctgaaagaagaagttcctgaaacgtctgcaagatgacgacaggcgacgagagcaccgcggccgagacgatgcccagacttgcgataaactgccatactgcgatgaccgcagccgggagtacaatccctttcatccattggtatgaatacttccgggatcttgccagagctttcttttctgattggcttattgcgccggcagccgttgatgcttctgctttcattacttgccatcccccgtttcaagcgcttttttaataaatgaattgtcgacaacgtcttttacatgaattttcttatgaatcgcttttgttcgatattgaaaatcagcggtttcctgctgggctttgacaatatcatcatcgatcggttcattgagaggctcagtattgttaagcacgtttctgacgactttcggatcaagatgtttgattttcgcatataaggagacggcttcatctttgtgttccttttgccatgtaactgctttattgaacactttcagaaaacggacaacctcatccgggtgttctttggaaaatcccgttctgactaatgtgaaaccgggagaatataaatctgtgctttctccgttcgccaatatttccgccccgtgctgcagcgtttcaatcgacaaatacggctcccaaatggaccatgcgtcaactgatttgttttcaaaagcggaaaccgcctcatcgggctgaagctggatgatggtgacgtcatcggcggaaagccccgctttatctaaagctttatagagaaaatcaaagccgctgctgcctttggctacggcgatttttttacctttcaattctttcaggctctgaatcccgctgcccttgtttacgagaatgccgtttgcctttaacccgtcctgagacagcccgatctctttaaaatcaattcccgccgcctgaccggaaatgaccggtgaattgccgacctgggaaaaatcaagcttatcggcggcaagaccttcaaattgcggaggaccgctttggaattcgacccattttacttttattccgtcttttttgaaggcctcttcaaaccagcctttttccttggcaatgagaagcgggcttaaactctgctggatgccgatccggatttctttcaccgttttcccgccccctcctgtcccgtctgcactgcatccggctgacatcatgactgctgcggctaaaagaatgatgatttttttcacttcgcttcgtcccttctatattccggacccatccgcaaaccggaggtcttccgttttctcaaattcagaaagcaccttctgccggacggcctgaaaatccgctgacgtccgattgcgcggatgcggaagctgaatcggcatcaggctgtgcagccggccgggctttgccctgaggatcgccagcttatcgcctaaatagacggattcatcaatatcatgcgtgacaagaatcatcgtcgtttttttctcgcgccatatatcaagcagcacatcctgcaaatgttttctcgtaaaagcgtcaagcgccccgaacggttcatctaaaagcagcacctccggctcacgcaaaagggctctggcgatggcaacccgctgcgacatgccgccggataattcgcgcggataagcgttctccgctccctgcagcctgacaacctcaatcagatcatccacttttttccgaacggccgggtcgttcatattgagatcggcagcgatgttttgttttaccgtcagccagggaaacagccggtgctcctgaaagataaatccctgccggatgcccggtcccgacacattgcggccgtttattgcgacagagcctttataatcggtatcaagaccggcaatcaattttaaaagcgtgcttttgccgcatccgctcggtccgatgacagtcaaaaattctcccgatgcaattgacagctcaatatcattcagcaccggcgttttccggccttcatgctcaaaagctttttcttgtatgctgatggttacagccatctgtcttcccctctctttctgccgcatgcgatcgaaaaacaaaaaggcccccatctccgattgcttgcagagatgggagccttcggcggtccgatcggcaacccgtttgtttttaaatttgaatatcatgttaattcaaattattccgacttgtcaactgttttttgtatgaattaaaaatgcgccttccggcataaacctgccaaagagcgcatcggctgtatcacgtatttacttccttttctttccgggcgattttcaataatgtctgcgcgttgttgccgaaaatgttttctatatcttcttcccgcatattgatttcccggcaggtcctcacctgctcctgaagatatctgtatacatatcctctcggaaatccgttcgaatccgtcccgaagatgatccgttcagcaccgattaattcagatgtctttcgaaacagaatttccaaatcaagccggtacggcatccacctcatccactgatttgagccggacgtgtcaatatacacattcgggcagctccagcacagctgcagcagttcctgataatatccggcgccgaaatgcggaatgatgaacggtatatcagcatactctctcgcgacgcgatagatggagagcgggttgatgttgcgatggctgacaatgccccccgctctccctaaaagtccgaagtgaattaatacaggcagtcttttgtcagccagatacgtccacagctttttcagcgacggatcatgaaactcgatgtctgtcagcggcccgaacagtttatatcctttcagaccgagctcttcaaccgctcttttcagctcctcatacgcatccttttgttccaaaggatgatatgcaaatccggtaaacctcgcgggattggcttgaataaacgccgccatccggtcattgctctctgctgttaaaaaattcagcacgtcaatgccgtacttatctaattctttctcccatcttgtcatcaaagcgatttcgccgtcatcgccatcaacatcatgcggatcaggaaaatcccaagtgagattcattctttccgaccgctcccggttataatcggaaaatgtcttatcgtttttgccgaaattaaggctgtacggcagatgaccgtgaatatcgacaggtttaaaatgctgccggaaaagcatacaatcgccgcctcccttaccgcctgacaataaaaaaaggcccttatccagtgaagaataagagcctcttgtgtccaagtcagcggtttctattttttctcatattaaacccattattcccgtcagtcaagtgtgttattaaacccataccttcttttcgataataaaaataattattttataatcattataaaataatattgactttttactgataggtgatattatgttcttataaatttaaagaggtgatcacatgagttcaaataaactgacaaccagctggggcgctcctgtcggagataaccaaaactcaatgacggccggcgatcgcggtcctgctttaatacaagacgtccatctgcttgagaaattggcgcactttaacagagaacgcgttccggagcgtgtcgttcacgcaaaaggcgcgggcgcacacggttattttgaagtcacaaatgacgttacaaaatatacgaaagccgcatttctgtcagaagtcggtaaacgcacgccgcttttcatccgtttctcaaccgttgcgggcgaactgggctctagtgacacagtgcgcgacccgcgcggatttgccgttaaattttatacagaagaaggaaactacgatatcgtcggaaacaatacacccgtgttcttcatccgcgatgccatcaagttccctgactttatccatacacaaaaaagagatccgagaacacatctgaaaaatccgacggccgtttgggatttctggtctttgtcacccgaatccctgcaccaggtaaccattctgatgtcagaccggggcattccggcgactcttcgccatatgcacggattcggaagccatacatttaaatggacaaatgataaaggcgaaggcgtctggattaaatatcactttaaaacagagcaaggcgtgaaaaaccttgatgttaatacagccgcaaaaatcgcgggcgaaaatcccgattaccatacggaagatttgttcaatgcgattgaaaacggcgatttccccgcatggaaattatatgttcaaatcatgccgttagaagatgcaaacacatatcgctttgatccgtttgacgtcacaaaagtatggtctcaaaaagactatccgctgatcgaagtcggccgcatggttctgaaccgcaatccggaaaattactttgcggaagtagaacaggcgacgttctctcccggcacattagtgcccggcgtcgacgtctcacctgacaaaatgcttcaaggccggttgttcgcataccatgacgcgcatcgctaccgtgtcggcgcgaaccatcaggcgctgccgatcaaccgttcccgcaatgaagtgaaaaactatcagcgtgacggacaaatgcgttttgatgataacggcggccgctccgtctattacgagcctaacagcttcggcggcccgaaagagtcacctgaagataaacaggcggcataccctgtatcaggtttcgctgacagtgtaagctataatcatcatgatcattacacacaagccggcgacctgtaccgcctgatgagcgaggaagagcgcgcgcgccttgtcgccaatatcgtcagtgcgatgaaacctgtggaaaaagaagaaattaagctgcgccagatcggccacttctacaaggctgatcctgaatacggcagacgcgttgccgaaggactcggactgccgtcaccaaaataacatcaaaaaacctgccggtctgcccggcaggttttttatgttcattatcaataaaaccgtttttttctcaattacacgaagtggcatgccgcaaaatgatgaaaccctttttctgacagcgccggacttttctcagcacatatcttcttggctgccggacatctcgttcggaatttacagcctgaaggcggatcagaggggcttggtatatcaccctttaaaattatccgctcccttttcgctccgggatcaggaacaggcacggctgataacagcgctttcgtataagggtgaagcggccgtgaaaagagctcctcctttgacgcatattccacaatcgtccctaaatacataatggcgaccttcgtacataagtgctccaccacgcttaaatcatgagaaatgaacaagtatgacagcccgtgctgtttttgaaggctgctgaacaaattgatcatctgcgcctggatggagacatctaacgccgccacgggttcatccataatgataaattgcggtttgagcgccatcgctcttgcaatcacgatccgctgccgctgccctcctgaaaattcatgcggataacgatcgatgaagtttgcggaaagtccgcaggcttcaagaacctccgccgctttatcacgcgcattccgcttcaccgccaattgatgctcgatcatcgcttcaccgatggcttctccgatccggcgccggggatttaaagaactgaacggatcttgaaagatgagctgcgcttccgatctgaaagttttgagctcgcgccggctcatccgaaacacatcacgcccctgaaaaaacacctctccccctgttttctcatgaagcctcaaaatggtcttgccgattgatgactttccgctgcccgattctcccgctaagccgaacacttctccctttcctatcgtaaaactgacaccgtcaaccgcttttacgggttttttatgagtctttctcatccccccatgctcctcgtaatattttttcagccccttgacctccagcaacacatcactcatctgctttctcctctctgtaaagccagcacgccgcctgatgccccttcccgaattcagtaaaatgcgggctcgatctccggcatatttccgtgctgtgttcacatcgctccgcaaaataacaagacgatcccgacaggtccgcaagctcggggacctgccccggaatggtgtaaagcgtctcccttttttgaccgataaccggcttggccgcgagcagccctttcgtatacggatgcttcggatcagaaaacagctctgcaaccggtccttcctccacaatttttcccgcatacatgacaatcacataatcagccatttcagcaaccacgccaaggtcatgagtaatgaataaaatagacgtgcgaaattgctttttcatatcccgcaataaatccaatatttgcgcctgaatggttacgtcaagcgctgtcgtcggctcgtcggcaatgatcagtttcggatcgcagcttagcgcgacagccgtcatgatgcgttgcagcatgccgccgctcagctcatgaggatatcggtgcataacctgctcggcattcgggatctccactaacgtgatcagttcaacggctctccgccatgcctctttcttactcagcaacaaatgttcgcgaatcggttcggtcagctgctcaccgattgtaaacaccggattcaaagatgtcatcggttcctgaaaaatcatcccgatttcgcttccgcggattttctgcatgtcttttggtttcagttccaacaggttctgtccggaaaaatgcaccgctccccgttcgattctccccgtctcgggaataagctgcataatggacaatgacgccatacttttcccgcagccggactctcctacaatacaaaccgtttcctcctcatgtatcgtaaagctgactccgtccacggcctttaccgcaccctcctctgtataaaaagccgtttccaaatgccttacttctaaaagcggttttttcatttcattttcacctgccgttttaccttaggatcaaaagcgtctcttaaaccgtctccaagcaaatgaatcgccacaacggtcagaaaaatggccgttcccggcggaatccacagccacgggcggagtgtaaaatccataaaatgattcgccgcttccatcatgtttccccaagaaggtgtcggcggagcaacgccaagcccgagaaaactcagcgcagattcactcagcatcgctcccgccacatgcaaagtcgccgctaccagtaataacggcaatgtgttgggaagcaaatgatagaggattttccgtttatcactaagccccaaaacttccgcggccatcataaacagctgctccttcagcgacaaaatctgtccgcgtacaagccgcgccaaaccgggccatccgatcaggcttaacatcatcataatcaggtacattctgtattcagaaggcactttccactccgacatcaccgcagccaaaatcaaaagcagcggcaggcccgggatggacatgagcatatcagcaatgcgcataatgatcatatcagcggctccccgataaaacccggccgcagccccgagtaaagagccgatgacaagcgacagcaccattgaagcaagccccacggtcagagaaatctgccccgccagcatcagcctcgtcagcacatctctcccgtactggtcggtgcccagccagtgatggattcccggatgctgattggcatttgaaatatccgtccgatctgttatgtacggagaaaaagacggcccgataaagcacaataaaaacataaaatataagaaaagaagactgatgaccgtcagcttatgctgcagcaggcggcggtacgtctgcttccaaagagaaggcggcacctctttttgttttttcattccgaacaccccctatttcagtctgacccgcggatcaaccgcggcataagcgatatccgccaagaagttccctacaatcgttaaacaagacaaaaacaaggtaaacgccatcaaaaccggataatcacgataatgcacagattcaagctgaatacgtccgacacccggccacccgaaaatctgttcaataatgatggctccggaaaacagtcccggcagttcaaaagcaagcagggtgatggccggaataagcgcgtttttcaacgcatgtttccagatgacggtgcgctctttcaatcccttcgctctcgccgttctgatataatcctgtctgatcacgtccagcatgccggagcggaaataccttgtcagcgagccgatgccgagcatagataaaatcacgaccggaagaatcatatgtctggcggcttcaagcacgtacgaaaaacctgtactcgtgctgccggtatcaatcatcccgccgacgggcaatattttcaaatccaccccaaaccacttaataaacagaaggctgataaaaaaagacggaaacgccatggaagcaaaaacaagaaacgtcacgatcccgtcaaaccatgagtatttcctgacagcggatatgacacccgttatcatcgcggctgaccatgtaacaagcaacgccaaaaacgcgacaaaaaacgaattccagacatatttccgaagcagtgacaggacgttctcctgatatttcaaagaaaacccaaaatctccgctgagcacatttccgagccatgtcacataacgctgccaaatcggctgatccagcccgtaaagcgcttttaactccttcgctctttccggagtcaggtttacattggaatcaatatagtcgcccggcagcatggcgaataagaaaaaaataataaaggacgtaccgaataagatcacaagcatttgaatgaatcgttctgcggcataccgtttcataaaaagcccctcctttccgctgaaagggcaaaatccccaggatgcatcgggtattttgcccaaccgttctattgaattgagacatttgagagacttgaactgattccagaataattgtcagcctcaagcccttttatttttccgctgaccgcccttgcgctctgacggtaatgaatcagaatgtaaggcgggttttccccgagctcccggtacagctggtgataaatctcttttcttttgctgatatcaagcgtgccggctcctttctctatcagccggtccgctttcggattggaataccccgtcacattattgggatggccggaagccagcttttccaccgtgtcattcggatcaaggatctgcgaggtggaaacggcggcaaggtcatattgtttgtcattgattttcgctacttctgtattaaaatccatcacttccggttttaatgagattccgatgtccgcataattttctttcgctatcgggatgaaatcatcatccgctttagatgtgtaatagctgatttcaagctttttgccgtttttttcacgtacaccgtctttgcccgttttccagcctgcttcgtcaagaagctttttggctttttcagggttaaacgcataccgattgacacctttgtcatcataagcccacgaaaccggagacaccggaacattcgcgacctctccgtagcgtttaaagcggacatcgacgattttttgacggtcaagtccgtaaataagcgcctgggacactttcttatcttgaaaaggcggacgcttgtgattgacgtacacaagcccgtaatcattcacgacagatacgcttatattcgcaaaaccgagactttttaaatgctgaaccgtatcatcatcaggtgagaaagaagcgtaatcaaggtcacccgtttcaaacagctgaagggaagttgacggatcgataattttataaatcagcttttccgttttcggttttccggcataatagtgttcattagcctgatagcgtatttcctgtcccggaaggtattctgtaaattgataaggtcccgctccgagcggtttggcataaagctcttttaaatagtccagtttgccgaattgatatttcttcccgtagtaggcttctgacagcacctgcccgcccaaaagaagcagcgacttcgcactgactttctcagtcgtgatttgaatggttctgtcatcaaggacgcgaatgccctctatcgtctttgcctttccttctttgtaagccttaccgcctttaatataagccgtggtgatatcttcatagcccgcgtatgcaggatcatgcagcagtgttaaagtgaatgcggcatcctttgcggtcagcggtgaaccgtcgctgaaaacgagattttttcttaaacggaacgtgtatgtaagctgatctttggaaattttccagctttccgcaagagccggggcaggcttccccgttttatccagtttgactaacggttcaaaaataggatctgtcgcatttccatcccagccgttttcgtaaaagtacggcagaaacacgccgcccggcgcggaaatcccagcaacaaaagtgtcagttctggctttcgatttagcgggaatcgccgccggatgagaagctttaaattcctttgtcttgacatgggtgatacgtgtttcttcctttttatcagccgcagatgacggttcttccccggcactccctaacgcgcaccctgataacatgatggataccgacagcgcgagtaccgttgttttcaacctccattttctctccttcatctttatcgaacccccgcatgcttttcatctatctttatataaatctgctccatctgttcctcatttctcataatctcccgtttgtttttctctacaagcagttcgaaattcaatgtgtgttttctgtactttttccgcttttttctctttttgcgcacatgtgataccttttttaacgccacttttcatccctccgcttttcatttaatgactttcacgcaaaaaaggcccttatctgtttaatagataagagccttcggtgatccgatcagccatcgtttggaaatatgtaatgattatgttaattcatacaatccctacctgtcaactacaatttaaaatatcgtgtccttccgggggttttcctcatacactctctcatttttccgcatatgctagaaaacatagcagattacaagtgaaagtgagtgagaatgtggaaaagacaacattgagcggtcgcatcgtcaaaaaagatgacccggactataatgccgcaagaaccaatttcaatttaagcctgcaaagatatccagacatcattgtgttttgccaaaacaaacatgacgccctcaatgcggtgagatgggcacgtgagaacaatgtgcctttccgtatcagaggcggaagacacagctacgaaaatttttccctgttaaatgacggactagtcattgatctcagtgaaatgaagaaaataagagtaaatgaggataagcggctggtctcgattgaagcgggagccgaattaggggaagtctaccggacactctggcggtacggcttgacccttcctgcgggaaccattgcgaatgtgggaatcacggggctgacgctcgggggaggaatcggatatttaacaaggactgccggacttacttgcgatcgtctcctccagctcgaaatgatcatagcggacgaaaaagcgggtgctgacttgatcacagtcaaccgctcaaagcactctgatctattttgggcatctcagggcggagggggaggcaacttcggcattgtcacatccatgatgtttaaagccgtgccgatctcgtgcgtgtctgttttttctgtcacttggggctgggatgatttcgaggaagtatttaatacgtggcagcgctgggctccatttacagacaaccggcttacctcatcaattcagttttggcctaaggaagtcaaccgcatagaagcactcggtcaatttaccgggacaaaagaggagctgaaagaactgctggctccgttaatgaaagcgggaaaaccgacaagcggcatggtcaagacagtgccatttattaaagcagcagccttttttaacagcccgggaggcaatcagccgcaaaagatgaagcggtcaggatcctttattgaaaaaccattatcaacacgcgcaatatccactttaaagcgctatttagagcacgctccgaacgaaaacgccagtgtctggcagcaatctctcggcggggcggccggacggatcgctccggaccaaacggcattctactatcgcaacgcaatcattgcccaagaatatattacaacttggacatctgctgaagaagaaagacaaaatgtccgctggatcgaaggactgagaacgtccctatcaagagaaacgatgggagattatgtgaattggcctgatagagaaatcagaaactggctgcaaacgtattacggagaaaatgttcaccgcctccgtcaagtcaaaacgaaatatgatccggaaaatatattccgcttcgagcagagcattccgccgcttcgccgttcaccgtttttctaaaaaagatgaagatggatacactccatcttcatcttttcttttattgatataagcggcttcccttctctgcaaactcttttgctttttctttcagcccttcattgacggcctcgtcttcagtaagtccgttttccttcgcataatcacgaatatcctgagaaattctcatgctgcagaacttcgggccgcacatcgaacagaagtgagccgtttttgcgccttcagccggcagcgtttcatcatgatattccattgctctttcaggatcaagcgacaaatgaaattgatcacgccaccggaattcaaaccgcgccttagacagagcatcgtcacggatctgtgcacccggatgccctttagcaaggtctgcggcatgtgccgcgattttgtacgtaatgacgccttctcttacatcatcacgattcggcagccccaaatgctccttcggcgtgacatagcaaagcatcgccgtcccgtaccagccgatcatcgccgcgccgattgctgaagtaatgtggtcatagcccggagcgatatccgtcgttaatgggccgagcgtgtaaaaaggcgcctctttacaaatttccagctgcttgtccatgttttccttaattttatgcatcggcacatgacccggtccttcgatcatcacttgcacatcgtgcttccacgcaatctccgtcaattctccgagagtctccaattccgcaaactgcgcttcatcattggcatccgcaatcgaacccggacgaagcccgtcaccaagtgaaaaagcgatatcatagctcttcatgatttcacaaatttcttcaaaatgcgtgtacagaaagctttcctgatgatgagccaggcaccattgcgccataatcgccccgccgcgggatacgattcccgtcgtgcgtttagccgttaacgggacataacgaagcagtacgccggcatgaatggtgaaataatccacgccctgctccgcctgctcaatcaatgtgtcacgataaatgtcccacgttaaatcctcggcaatgccattaactttttcaagcgcctgataaatcggcaccgtccccacaggcacggggcagttgcggataatccattcacgcgtcgtatgaatgtcttttcccgtggataaatccatcatcgtatcagcgccccagcgaatcgcccacgtcattttttcgacttcttcttcgatagaagatgtaacagccgagttgccgatattggcattaattttcacatgaaaattccggccgataatcatcggctcgctttccgggtggttgacgttagaaggaataatcgcccggccgctggctacctcgtctctgacaaattcgggagacacatgctcgcgaattgcgataaactccatttccggcgtaatgatgccttttctcgcataatgcaattgtgttacatttttccccggcttggcccgaagcggtttccgctgcaggccggggtattcggcagcatgatcttcttttttatagccgttgtcttcaggtctcacggtccggccgttatattcttctacttctccgcgcccggtaatccactttgtgcggagcgcccccagaccttcatgaatatcaatctgtacatccgggtctgtatacggtccgctcgtatcataaacacggaccggcgcattctcctcttccccgaatgcccccgtagtcgcactcaggctgatttcccgcatcggcactcgtatgtcgggcgaagaaccttctgcataaacctttttactgccggaaaaactcgacataatggaaatgttcgcttgctgtactgattgattttgcatacaaatctctcctttatcatttgaataacagaaccaagctcagcaccagcacaaaaaaaccgggttcaaagaagaacccggttttgcagtcagaaagaaactattattgttttcctcaacaataataaaacctttacttccccacgctggtacgaaccagatcaggtccaaagggttaagaagccgccgcttctctctcagcccgctcagacgggcacccccagtaactattgatttcgctctcatcgtaacataagttgtgtacaaaaaaaagcatattatcaaaattcagataacggaatggtcataagctctgtttcccgaacgccttcttcggtattaaaaacccgataaccctttgcggtttcccgggaagagacagcccggaacagctgaccgtctttataatgaagcgcagcgccgtcatcagcggcatagccctccctgagtatcttttcggaaatcagacggtgatacaccggccggcgctccgcttctccgtcatagtgcggacaaaagctgcccggcaaaaatcctaaagctgttaactctcgcaaatcccccgctgaatccgtcaccccttcttcataccagcaaatcgctccggcgctgagacccgctaagatgatgccgttttcccaagcctcacgaagaataaggtcaagcccccactctttccataagacaagcatattgcgcgtatttccgccgccgacatatataatatctttcttcatgagaaaggatctgagatcagaacccggcggtttaaacagcgacaagtgatccggctcacaccgcagcttttgaaaggcctgataaaacctgccggtatatttctccgaatctccgcttgccgtcggcaaaaaacaaactttcggctttgaccgcgccgactgctctaaaatatactgatccagcacaagatgatccggctccatggaaaaccccccgccgcccattgcaataatctgcttcaatgtcatcacttctttttttctcaagtataacagctcattaaaaaggcgttatctcaatttcggataacgccttcaaaaagtatttgttatctgaaaaatacgcaccgtataacacaacggagatccccgcggcgttaatcgccggaacaagcttcgaacgggcatacttcgcaacattgatccccaacaccgtattatcactgaggggagaagcaaaccaaatgttccgctcgctaataataagctggtatgtaactgaaccgccagcgttacgccgagcgccccaagtcccccaggatgacccgataaaatgggatataacagcccccagtataaaaagagacggcgcaataaacatatgagggctccatgatgttaaatgagaagtaacatatttcgagaatcccagattttcagctactgctgttacggcccaaatcagcgataacataataataacgttgaccaattcgtttccgcccttaataaaatgggtaacaagctcgcctgcaggaaagcgctgaaacataaaaagagcaaatactgcaataaccgctgccaataatgcgcgcttttgaatggccgccccaccagctgagaaacagtgttaatagcaaaaacagcccgatcggaaagatttaactccacggccgaatcggtgtttccttaatataagcacggtgcgccgaatccagctcctcctactgcaggtatcatgttttcacaagccttggagatattttcatacaacaaaaaaggcttctacaatatgtagaagcctttgtataccggtggccggggtcgaaccggcactccagaaggaacacgattttgagtcgtgcgcgtctgccaattccgccacaccggcatataatgcgtcgtgttcaaccgacgtatataaatataacatgcattctataaagagtcaatggttttagtaaagttttttcaaatggtaatgcagtatatacgatacaagcaagaaacttatattgatagtcttcacgcttttattatataaaaaaagcgacctgcaatatgcaaatcactctcatatatgttttataataagaaaattgatgaccaatttaacataattcgctcaaagttaaattggtgccgagggccggacttgaaccggcacggtagtcacctaccgcaggattttaagtcctgtgtgtctgccaattccaccaccccggcaatagaaaggcgacacccggattcgaaccggggataaaggttttgcagacctctgccttaccacttggctatgccgccgtaatttggagcggaagacgggattcgaacccgcgacccccaccttggcaaggtgatgttctaccactgaactacttccgcaacatgtaaaagaacttaatacatcttatgctgttgttttcaaaaaaatgcaactgggctagctggattcgaaccaacgcatgacggagtcaaagtccgttgccttaccgcttggctatagcccaatgataatatggggcgattgatgggaatcgaacccacgagtgccagagccacaatctggtgcgttaaccacttcgccacaaccgccataatctgaagatgaataaataatatagtggcaggggcagtaggaatcgaacccacaccggaggttttggagacctctgttctaccgttaaactatgcccctatttataaaatggtggaggggggcagattcgaactgccgaaccctgagggagcggatttacagtccgccgcgtttagccacttcgctacccctccatcatttagagtgccggccagaggacttgaacccccaacctactgattacaagtcagttgctctaccaattgagctagaccggcaaatggtggctcgggacggaatcgaaccgccgacacacggattttcagtccgttgctctaccaactgagctaccgagcctttttataaatggcggtccggacgggactcgaacccgcgacctcctgcgtgacaggcaggcattctaaccaactgaactaccggaccatttttttggttgcgggggcaggatttgaacctgcgaccttcgggttatgagcccgacgagctaccgaactgctccaccccgcgatgataatggtggaggatgacgggctcgaaccgccgaccctctgcttgtaaggcagatgctctcccagctgagctaatcctccatcatataagtgacccgtacgggattcgaacccgtgttaccgccgtgaaagggcggtgtcttaaccgcttgaccaacgggccctggtattttttcgtttgttatgtattgataattagtggcggagagcaagggattcgaacccttgagacggggttaccgcctacacgatttccaatcgtgctccttcggccactcggacagctctccataattggctccgcaggtaggattcgaacctacgaccgatcggttaacagccgatagctctaccactgagctactgcggaatgaagtctgcctggcgatgtcctactctcacagggggaaacccccgactaccatcggcgctgaagagcttaacttccgtgttcggcatgggaacgggtgtgacctcttcgccatcatcaccagacgttttagtgacatgtattattatactatgtatttcggaaaaagcaagagtttttttaaaaaattctctcaaaactagataacagtaagcatacattcaaattggttaagtcctcgatcgattagtatctgtcagctccatgtgtcgccacacttccacctcagacctatcaacctgatcatctttcagggatcttacttccttgcggaatgggaaatctcatcttgaggggggcttcatgcttagatgctttcagcacttatcccgtccgcacatagctacccagcgatgcccttggcagaacaactggtacaccagcggtgcgtccatcccggtcctctcgtactaaggacagctcctctcaaatttcctgcgcccgcgacggatagggaccgaactgtctcacgacgttctgaacccagctcgcgtaccgctttaatgggcgaacagcccaacccttgggaccgactacagccccaggatgcgatgagccgacatcgaggtgccaaacctccccgtcgatgtggactcttgggggagataagcctgttatccccggggtagcttttatccgttgagcgatggcccttccatgcggaaccaccggatcactaagcccgactttcgtccctgctcgacttgtaggtctcgcagtcaagctcccttgtgcctttacactctgcgaatgatttccaaccattctgagggaacctttgggcgcctccgttaccttttaggaggcgaccgccccagtcaaactgcccacctgacactgtctccccgcccgataagggcggcgggttagaaggtcaatacagccagggtagtatcccaccgatgcctccaccgaagctggcgctccggtttccaaggctcctacctatcctgtacaagctgtaccaacattcaatatcaggctgcagtaaagctccacggggtctttccgtcctgtcgcgggtaacctgcatcttcacaggtactataatttcaccgagtctctcgttgagacagtgcccagatcgttgcgcctttcgtgcgggtcggaacttacccgacaaggaatttcgctaccttaggaccgttatagttacggccgccgtttactggggcttcaattcgcaccttcgcttacgctaagcgctcctcttaaccttccagcaccgggcaggcgtcagcccctatacttcgccttacggcttcgcagagacctgtgtttttgctaaacagtcgcctgggcctattcactgcggctctctcgggcttgcaccctaacagagcaccccttctcccgaagttacggggtcattttgccgagttccttaacgagagttctctcgatcaccttaggattctctcctcgcctacctgtgtcggtttgcggtacgggcacctctcacctcgctagaggcttttcttggcagtgtggaatcaggaacttcgctactataattcgctcgccatcacagctcagccttcacgggaaacggatttgcctatttcccagcctaactgcttggacgcggatatccaataccgcgcttaccctatcctcctgcgtccccccattgctcaaatggtgaggaggtggtacaggaatatcaacctgttatccatcgcctacgcctttcggcctcggcttaggtcccgactaaccctgagcggacgagccttcctcaggaaaccttaggcattcggtggaggggattctcacccctctttcgctactcataccggcattctcacttctaagcgctccacaagtccttccggtcttgcttcacagcccttagaacgctctcctaccactgttcgaagaacagtccgcagcttcggtgatacgtttagccccggtacattttcggcgcagagtcactcgaccagtgagctattacgcactctttaaatggtggctgcttctaagccaacatcctggttgtctaagcaactccacatccttttccacttaacgtatactttgggaccttagctggcggtctgggctgtttccctttcgactacggatcttatcactcgcagtctgactcccaaggataagtcatcggcattcggagtttgactgaattcggtaacccggtaggggcccctagtccaatcagtgctctacctccgagactcttaccttgaggctagccctaaagctatttcggagagaaccagctatctccaggttcgattggcatttcacccctacccacacctcatccccgcacttttcaacgtgcgtgggttcgggcctccattcagtgttacctgaacttcaccctggacatgggtagatcacctggtttcgggtctacgaccacgtactcaattcgccctattcagactcgctttcgctgcggctccgcatcttctgcttaaccttgcacgggatcgtaactcgccggttcattctacaaaaggcacgccatcacccgttaacgggctctgactacttgtaggcacacggtttcaggatctctttcactccccttccggggtgcttttcacctttccctcacggtactggttcactatcggtcactagggagtatttagccttgggagatggtcctcccggattccgacggaatttcacgtgttccgccgtactcaggatccactcaggagagaacgaagttttgactacagggctgttacctcctatggcgggcctttccagacctcttcatctacctcgttcctttgtaactccgtacagagtgtcctacaaccccaagaggcaagcctcttggtttgggctggtcccgtttcgctcgccgctactcagggaatcgcatttgctttctcttcctccgggtacttagatgtttcagttccccgggtctgccttctcatatcctatgtattcagatatggataccactccattacgagtggtgggtttccccattcggaaatctccggatcaaagcttgcttacagctccccgaagcatatcggtgttcgtcccgtccttcatcggctcctagtgccaaggcatccaccgtgcgccctttctaacttaaccgttaaaaagaatcactacgtgatatcttgcattactaattgaatgtgaattacttctgttatctagttttcaaagaacaacgcataggacatgctaacacatgcgttgccacaggaagtggcgcatttagcaggtgttcctatgttttgaaggaatgatccttcaaaactaaacaagacagggaacgttctgtttataagacccgaggtcttatattccgttaaaatccttagaaaggaggtgatccagccgcaccttccgatacggctaccttgttacgacttcaccccaatcatctgtcccaccttcggcggctggctccataaaggttacctcaccgacttcgggtgttacaaactctcgtggtgtgacgggcggtgtgtacaaggcccgggaacgtattcaccgcggcatgctgatccgcgattactagcgattccagcttcacgcagtcgagttgcagactgcgatccgaactgagaacagatttgtgggattggcttaacctcgcggtttcgctgccctttgttctgtccattgtagcacgtgtgtagcccaggtcataaggggcatgatgatttgacgtcatccccaccttcctccggtttgtcaccggcagtcaccttagagtgcccaactgaatgctggcaactaagatcaagggttgcgctcgttgcgggacttaacccaacatctcacgacacgagctgacgacaaccatgcaccacctgtcactctgcccccgaaggggacgtcctatctctaggattgtcagaggatgtcaagacctggtaaggttcttcgcgttgcttcgaattaaaccacatgctccaccgcttgtgcgggcccccgtcaattcctttgagtttcagtcttgcgaccgtactccccaggcggagtgcttaatgcgttagctgcagcactaaggggcggaaaccccctaacacttagcactcatcgtttacggcgtggactaccagggtatctaatcctgttcgctccccacgctttcgctcctcagcgtcagttacagaccagagagtcgccttcgccactggtgttcctccacatctctacgcatttcaccgctacacgtggaattccactctcctcttctgcactcaagttccccagtttccaatgaccctccccggttgagccgggggctttcacatcagacttaagaaaccgcctgcgagccctttacgcccaataattccggacaacgcttgccacctacgtattaccgcggctgctggcacgtagttagccgtggctttctggttaggtaccgtcaaggtgccgccctatttgaacggcacttgttcttccctaacaacagagctttacgatccgaaaaccttcatcactcacgcggcgttgctccgtcagactttcgtccattgcggaagattccctactgctgcctcccgtaggagtctgggccgtgtctcagtcccagtgtggccgatcaccctctcaggtcggctacgcatcgtcgccttggtgagccgttacctcaccaactagctaatgcgccgcgggtccatctgtaagtggtagccgaagccaccttttatgtctgaaccatgcggttcagacaaccatccggtattagccccggtttcccggagttatcccagtcttacaggcaggttacccacgtgttactcacccgtccgccgctaacatcagggagcaagctcccatctgtccgctcgacttgcatgtattaggcacgccgccagcgttcgtcctgagccaggatcaaactctccgataaagtagtttgactgactacgcacatcgctgtgcgatttatttaaaactttgaattaacaggtacgttttgtcttgtttagttttcaaagatcatctcaacctcatctcgaggcgactttttcagtataacatttcagcgatttgctgtcaaatgtttttttgtttttatttctccgccgctgtgagctttttggtgaagcgcatcagcgacgtttaataatataccatgcctatgattcagcgtcaacactttttttgaaagaatatcctcgatgatatacttcctgccctttggtctctatttgagatacttcaacaaagcctttttccgtcaggtaatcaagcatgacaccgagatcttgggtgaagtgcaccagttcagggtgctgaagcaattctccaaactgccacatttctttttctttcatcacctgaaaaaggtgcgcagaaccgatttcagcttttgaatggatgagaaaatcatttgctaagaataataattcgagccttttctccaagctttcgtgactctcgacaagttcggaatatagcttatatacctgcggctcaatgtgacggacctggttccagactgtcgtttcgggataaaacccccggtcaatcacttctatgcgggccaagtggtgaagagcgtgcactaccgcataatatgcatccagaaaatgatcagcttcaaaaaacgcttttccttctacaaatcttctgatcagcttgccgtattccattccgatctttaatttccgctcggcgaaaggaaaagtgctgagccggtcattgagttcagatatatattcattgcggtcaaacagcactttgccgttgatgatccaatctatgactcttctatttgtcccaagcagaatccattcctgaagcagagcatccgttacaatatgtaaagaagcggttttgtgttcgaattcataatgctttataaaaagaggttcatcagcctgtttcacaatgacaagcatgaccgcatcaaagttatccgtgatggatgatgctttactccttctctcaatcataaggacggccagcgtatcgggatgacttgctctttcttggtaaattggacggagaagattgtccattacgattcctccaatgcgattgtttcactagctattgtttctacatttctatgataaaacatgaaagtccttttttctaaacacattgcactattataacaaatttcctttcaggtgccatatttattcttcccttttcttacgaaaacatgaagaatatgccatatgttttgtgctatagttaaacgagagggggatggacatggcgaaatactcaagcaaaattaataagatcagaacgtttgcgttaagtttggttttcgttgggtttatcattatgtacatcgggctgttctttaagcagtctgttttgcttgccagcttgtttatgattctcggcctgctgtcgatcggactcagcaccgccgtttatttttggatcggcatgctgtccacaaaagcggtccgggtgatgtgccccgcttgcgagaaagaaacgaagattctgggcagagtggatatgtgcatgcattgcagagagccgcttacattggataaaggattggaaggcaaagcgttcgatgagtcttataacagaaaaaacagtgtaaaataaacgaagctgaccgtatcaaagcggtcagcttcgtttagtggttttcttttttggaacattcttggcagacgccgtaaatctccaaacggtggtggcttaccttaaaccctgtgacgtgagcagcaagctgttccacttcgtcaagcccgggataatggaagtccacgatttttccgcagctttcacaaatggcgtgataatggtcagaggtgacaaagtcaaatctgctggacgcatctccgtacgtcagttcctttacaagccccgcttcccggaatacacgcaaattgttatacactgtcgcaacactcatattagggaatttcccttccaaggctttatatatatcgtccgctgtcggatgtgccatagaatccacgagatattccagaatggcatgacgttgaggagtaatccggactcccgtatccttcaacgtgtctaaggcttcttttaattcatgtgcagccatccgtcatgcacctctcttctaaaaaagattcttactttataatgtttataattagtgtacatctttttccggtctcctgtcaaatgtaatctgaagaaaaccccgtgagttcagcatttgtccattaattagacgcaatttgttccaattcacgaagcgcctcggcaacgtgatctttcacttttacctttctccactccttcacaagacggccttctttgtctaacaaaaaagtggatcgctcgatacccatatattctttcccaaaattcttcttcagcttccacacatcaaaagcttccgccagtttgtgctcatcatcaacgaggagctggaaaggaagatcgtgtttttgcttaaatttttcatgtttatcacggctgtcagggcttactccgatgataaccgcatcaagtcccgcgaaactttcgtgctgatcacggaaatcacatgcttccgtcgtgcatccgggtgtcatgtctttcggataaaaatagagaacgacgtacttccctttaaaatccgtcaatgctacttcttccccgctgtcattcactaatttcatatccggtgctgtttgtccgatttcaatcgtcatttcttatacctccgggttttttattaagcgtatccaattcacgttaagattacaaccgttatcccccggctcttttctggaagcatgaacccgttgtgctcgcaatgaagcatgctacaatagaacatgatgtaaggagatattaggagggtcattttttgtatacaaaatcagttgaacttcataaggaagcgttagagcatatcgtcggaggcgtgaacagcccgtccagatcctataaagcggtaggcggcggttcacccgttgcgatggaaaaagcgaacggcgcttatttctgggatgtagacgggaatcagtatatcgattatttagcggcttacggtccgattattaccggacatgcccatccgcatattactgaagcgattaaaacagcggcggaaaacggcgtgctgtacgggacgccgaccaaacatgaggtcactttcgccaaaatgctgaaggaggccattccttcacttgataaagtacgattcgtaaactcaggcactgaagcggtgatgacaacgatccgggttgcacgcgcttatacaggccgcacaaaaatcattaaattcgccggctgctatcacggccattctgatctcgtacttgtcgctgcgggttccggcccgtctacgctcggcacccctgattccgccggcgtgccgaaaagcatcgccaatgaggtcattaccgttcctttcaatgatattgaaagctacaaagccgcgctggataaatggggttcagaaattgcagcggttctcgtcgagccgatcgtcggcaacttcggcatcgttgaacctgaagaaggatttttagaacaggtaaatgaattgacccataaagcgggcgcgctcgtcatttatgatgaagtgatcacggcgttccgttttatgtacggaggcgcgcaggatcttcttcaagtgaagcctgatttaacggcgctcggtaaaattatcgggggcggcttgccgatcggcgcttacggaggcaaaaaagagatcatggagcaggttgctccgctcggcccggcatatcaagccggcacgatggccggaaacccggcatctatcctatcaggcatcgcctgcctggaagtgctgaaggaagaaggcgtttacgagcggcttgatgagctcggcgccagacttgagcaaggcattctcgcccatgcggagacacatggcattaccatcaccgtcaaccgtttaaaaggcgcgctcacggtttacttcactgatgaaaaaatcgtcaattacgagcaggcggaaaatacggacggagaagcattcgccaagttcttcaagctgatgcttgaacgcggcatcaatctcgctccgtcgaagtatgaagcttggtttatcacaaccgcacatactgaagaggatatcgacgccactttacaagccgttgaagatgcgttcagacatatgaaaaaataacttctgaaacaagcgggagcccggggcttccgctttttctttttgtccgatttgtgagataatggttttttcaaaaaaagaccttgaataattggtatgatccctgtatattactttattgtttagcaaatcagccgacagggaaatgtaagtgtcagccgttcgttcggcacataatttattagagaaaggaatgcacgcacaaaccaatgaaacttggtgcccgcatttttaaaacagggattgcgattacgctcgcgctctacttagcatcatggatcggacttccgtcgccgatctttgccgggattgcagctatatttgccatacagccctctatttacaggtcttttcttatcattattgatcaggttcaggcaaatatcatcggcgctgtcatcgctacggtattcggactgattttcggaccgagtccgattatgatcggattgaccgcagtgattgtcatcacgatcatgttaaaactgaaaattgaacacaccatttcgattgcgctcgtgacggttatcgcgattttagaaacaccgggaaacagcttcctgacgttcgctctgatacgaacaagcaccgttattttaggcgtgctgtcttcttttattgtgaaccttgtgtttcttccgccgaaatacgaaacgaagctgactcatcatacggttgaatataccgatgagatcatgaaatggatcaggctgacgatgcgtcagtctacggaacactcgatattgaaagaggatattgagaagctgaaggaaaaaatgatgaagcttgatcatacgtaccttctttataaagaggagagaagctactttaagaaaacgacgtatgtaaagtcgcgcaagcttgttttattcagacaggcgattattacggcaaatcgggcgcttgatacgctgaaaaagctgcaccgctatgaaaacgagatttatcatatgccggaggaatttcaggagacgctgacagaagaaattgattatctgcttcattggcacgaaaggattctgatgcggacggtcggcaagatcaaaccgcatgatgacgatgctgaagaaagcataagatataaacagcttttgacgaagtctttcttgaaaaatcagcagaactgcgaggatgaactgcttgattacaatatgctcagcattatggctgcggttgcggaataccgcgagcagctggagcatctcgatacgctaattacgagttttcagacataccacccgaaagacagcgaattagaaacagacgaagagtaacccggtgcttccgtaaaaccgggtttttttgcattcaaaaaacgtatgccgcccattcggacggcatacgtttttgtatcagttcaaattctgaatcgtaaataagtgtctgtactggccgccttgggccattaattcctcgtgcgtgccggtttcgacgacggcgccgttttccatgacgacaattttatccgcgtgcgtaatcgtggacagtctgtgggcgacgataaaagtcgtccggtttttcgcaagcttttccatcgcttcctgaatgtagtgttcactttcaagatcaagagccgatgtcgcttcatccaagatcagcagcggcggattttttaagaatacacgggcgatcgaaatccgctgcttctgcccgcctgacaatttgacgccccgttcgccgactttggtttcgtagccttcggggaagttcataataaattcatgggcatttgccgctttcgcagccgcaaccacctcatccagagacgctcccggtttaccgatagcgatattttcacgaatcgtctcactgaacagaaacgtatcctgaagcaccattccgacttgattgcggaggcttctcgcttcataatcgcgaatatctgtgccgtcaatcagcaggctgccgccggatacatcataaaaacgcggtatgaggctgacaagcgtcgattttccgccgccgctcatcccgacgagcgcgacggtttccccttttgtcacctttaaggaaacgtcctgcaaaatcgtttcttttccttcctcataacggaacgagacatttcggaattcaacttcacccttaatgccgtcagcttttaatgcattcggtttatcagtcagttcatacggctcgtcgataaattcaaatatgcgatccattgaagcgatcgactgggtcagcgtcgtcgatgagttgatcaatcttctgaccggattgtacattctgtcaatatagccgacgaacgcaaccatcgtccctaccgtcagcgggccgtttatgacaaaataacccgcaaacgcgataacaagcagcggcgccaaatccgtaatggtattcacaactgcgaacgttttcgcgttccaattcgtatgacggatcgctttgtccagaaaatgtccgtttttttcatcaaaattggcttgttcataatcttcaatggcgaaacttctgataacgggcatcccctgaactctttcgtgcaaatgtccctgaacttgggcgagtgcctgagaacgctcacgtgtcagttttcggagacggccgtaaaagtatttcactgaaattccgtataacggaaacaaaatgacagatatcaatgtcagcttcacatcgagtgtaaacataatacagatgacgatcagcaccgtcatcatatcaagccagatattcatcagtcccgttatgacaaagtcttttgtctgttcgacatcatttatcacccgggaaatgacttcgcccgttctcgtgttggcataaaacctcaggctcaatttctgaatatgatcaaacaatacccccctgatatcgtagagcacccggctgcccgtccattgtgcgaagtattgccgatagtactctaccgggggacgcagaattaaaaacagcacgaacatgatgcccattatcgtgaatagcgatgatgttttagcgcttgccgttccgctcccttgaataatgtcatcgaccacgtattttaacagaagcgggagagccagcgggatggagaattttataatgccgattaacactgtgataaaaatttgttttttataaggttttacaaattgcatatagcgtctgattacgcccacactttatccccctctctctttaaggcgtgtgagcccatgtgaaaaacctgttgacaccccaacaggttttttattgtattctttattttgtatagcgcagataccgttcataccacatatcaacaaattccggagcaaacggtcctttccgctgatgaatccaatgcagcagcgtattcagatactccttcagaatgctgtcgatctctttagggtaattcattgatttgcggtggtcatcgtattcatcctcgtcaagaatgttatacgtcatatccggaaacaccttgacatccaaatcgtaatcaatatatttgatggcctctccgtcataagcgaacggcgagctgatgttgcaataatagtgtaccccgtcatctctcagcattccgatgacgttaaaccactgacgggcatgaaagtagcagatcgccggctctctcgtcacccacgtccgtccgtcggattccgtcaccattgtccggtcgttggctccgatgatacacaattccgtactttttaaaatcgtcgtttcattccaaattcgatgaagcagcccgttatgcttatagctgtgaatttgaatggtttctccttccttgggatatcccatatttctcccctactttctgtaaagccctgcagtcaatgcagccgcaattgctttccgacaagtcttttcactattataacgttacgaattaaaaaatgaaaataaaagaaccactccgcttccggaatggcacattcatttctgcacataggaagacggcttttccgtgctgcgataagactggatgacttgctctgtctgcctttggaataactcctgtatgccggccaggtcttttcgctttgtcgcaatttcgtcctgtacattgtccagctttgcatctctttccagactgatgagttccgcttccacctgccggcagcggtcaagttctgactgcagctcgagaagctgatccatgattttcatctgttcacttacaagcttttcaaactctgacatcgggttcctccttaggctttaggttgatactccttaccatttcgattttacgccggaaaaccctttgactcattctgtagaggaatcacaagttttgtcgttttagcaacagaaaaaagcacttccatccgaagatgaagtgctttttcgtttcagtgattagctgttttgctgtttgttttgttcagcagattggttttgctttctaacctgctgcgcatcagtttcactgccgaattcagtgccgtattgaccctgaccggaagctgattgctggttttgtcttttcacctgctgaacgtctgttttgctgtattttgagtttgccattgttatcacctccacgcactttagaatgcgcaggagacgataaggctattcatctttttttaaaacttatacgagcagagagcgtccgccgtcaataatgatggtctggccgcggatcatgtccgcttttgaagaaactaaaaactccaccgtgtcgatcatatctttaatctcgaccattctgccggccggcgtattttggcgggcatcttccagcagttcatctctgttagggaaatgcttcagcgcgtccgtatcaatcgctccgcctgacaccgcgtttacgatgatgtttttcggagaaagctcaaccgccagataacgggttaacgattctaaagcggcttttgagacaccgaccgtcgtatagttttcaagatagcggatgctgccgagcgagctgatgctgacgatgtggccgcctccgtttttctccatcatctttgccgcttcctgggcgcagaaaagcaatgctttcgcgttgatattcatcgtccagtcccagtgtgtttcttcgagttccataaccggtctcagcacgcctgaagccgcattattgacgaacacgtccagtctgccgaatgtttcgtcaatctggcggaacatgtctttgatttttgccggctggccgacattagctttaataacgagcgttttaacgccgagtttttcaatttcttcggcggtttctaatgccgcttttttactgcgggcgtaattgatgacgatattgtatcctttttccgcgagtctgatggcggctgctttcccgacgcctcggctgcttcccgtgatcagtgcgcatttattttgttccatttttcctcagctccttgctgtgtatagttcttttcattcaacaaacaataaaagcaatatctgttgaaaggggtcttttatatgtatgtcggacgtgatatgggcgaattggccatgatgcccaaacaagattggagagattcagagctcgcctatttccatcatgccttccagcaaattatgccgtatttaaacgaagaaggccagtccaaataccgggaactgattcaggaaatcgaagcccgcggcggactgaaacggaatgaagcggattacggccacggcactcgcgtcagctatgactgacgctttttagcggccgctttcttccgccattttccatatcttttgatgggaaacgggaaatgcgtattccttgagctcctcttttgtgacccgtatgaattccgttgtatccgacacttgttttactttaccgaaaaagaccgaaatattccagacgagatgggtgaaaacatgttctacgatgccttccagctccccgatttcagcggttattcccatctctttttctaaataggcttcaagctgctctctttcggttttgattcctttctgggtttcggtattcggaaactcccacaagttggcgagcaagccttttggcggccgtttatgaatatagacatcgccttgttcgtctgtcagcacaacggctgccattgtttttattccgggctttttctttttgcttttaacgggcagctcccgctctgtcccttccgcaaatgccgaacagtgcttttgtacggggcaaagcaggcatgacggtgatttcggggtgcagatgatcgcgccgagctccattaaaccctgattgaattcagatggtttttcatgagaaatgaaagcggataccgcctgttcgaaaatggttctggttttaggttttgcgatatcgtcccatatggaaagaattctcgacatgacacgcatcacattgccgtctacggcgggaatcggtttgttgtatgcgatgctgagcacggcgccttttgtataagggccgacgcctttcagtccgccaaattccttttccccggcagggacgactcccccgtaccgctcatgtacttcttttacggcactttgcagatttcttacacgggagtaataacctagcccttcccaggctttgagcactttttcctcatcggcttcagcgagcgccgaaacggtcggaaattgctcaacaaaccgccggaaataaggaatgacggtatctacgcgcgtctgctgcagcatcacctctgacacccacacccgatacgggtcctgattttctctccacggcagaattctctgttctctttcgaaccatgtaattaagtcctcgcgaaatttgtctatatctttttgtttcattttttcttcaagtgcgttcatatcttctcctcagatgtttcgggttccgcttttcttgacactgtattttggtgtaaactaagggcacgttacgataatatgttacattaaatagtgataaagaaaaagcggaaacatatgagaacggcggataaacgccatgattgggcaaacagaaaatggggaatatcttataatgcgaaatatgcgggcggctgatttttaacgcctgctaggaggtcaacaatggatactggcactcacgttgtcatgggtatcgcgcttggcggaatcgcaactcttgatcctgccgtcggcatgcacaccccaatgtctcaggcagttatgatcgccgcgcttgccggctctcaggcacctgatattgataccatattgaagctgaaaaataatgccgtttatattcgaaatcatagaggattcacgcactccattcccgccgtattattttggtccgttctgattccgggcattttgtttatgttttatccggaagcgaactttttgcacctgtggctgtggacgcttctggctgtcgttttgcatgtgtttgttgacatttttaacgcgtacggcacacaggccatccgcccgttttcgagaaaatggatcgctctcggtttaatcaatacctttgatccgtttattttcgtcagccatttggccgcgattgccgtttggtatatcggaggtcatccgggcgtgacatttctgatgctttatatcatccttgcaggatattacgccgtccggtttttgatgcagctgcggataaagcgaaggctgcgcgaaatgattgaagaggagattgaaaccatcattatttcgccgacgatgaaattcaggcagtggcgtatcgccgtgacgacggcccatgccttttatgtcggcagaagccttgacggccatgtcgtgatattggatacattcaaccgcgtgcccgttccggaaaccgatgtgatgaaggccgcgaaacaggacgaaaatattgcagcctttctttcattttcccccgtttacaggtgggaggtcgatacttttaaagatcattatgaggtgcgctttattgatttgcgctaccggagcaaaggccactatccttttgtcgccatcgtccacctcagtcatgatttagagcttctctcttcctacacgggctggattttcagcgaggaaaaactgcagaaaaaattaaagctcggctctgtttaagagccgggctttttttgtcttctcacatataatgcggcaaacacgaggctgatcaccgatagagcggccgcgggtttaaaaaacggcgggtaatacgttaattgaatatcgttttttcctttttgcgctttaaatccgataaaggaataatccgctttttcaatctgttcttttctgccgtttatcttcagctcccagcctttttcatatggaatcggaagcatgatatacggcgcgctggttttgttttcatacgagatatgaagcgtatttccgcgccatctgagatcggcccgcggttctttttccgcttttcggtatgcgtttttcagcgtatcgtaccgttcttcgtaaagcgccagcctgtcaagctgatacgatcctttcggcagacggatttggatgttttttgttttcggcactctgacagtaagatcgttgacacctgttttgtaaatggattgattcgattttctcgttgtcgtgtaatcgttcacttttaatgtaaagccctggtccttcgctttattcttcaaataaaagctgacgtaataatcgccgccgtccatcttagcggcttgcggcgtaatgatcaggccgccgccgtcttcatttaccgtcaggatgccgtcttgataatccgcatggtcggccgttacctttgcctgacggatcatatttttcgcctcaggcgcttttttcgtgttggctgcgcttgattccgtgatgatcccgtcaagcattgcccgttctctggcaagggagggcgcttttttcagaccgtcctcgttatatacgcgatcagctgtccgtacgaacggaagcatatattgattttgataaaccgcataatgggatgattccatgatttttttgaacccgtacggcacgccggccccgtttgttttttccgtcatataatattttccgtaaagcaggctgtataaattagccctgtttcctaatgtcgcataacggctgacgctttccctgcccatgtcaatccggaggtcgttccagtaaaaggacagcagattgcggttcagtatgcttgaatatacgctgaatccgttgaacccgtatatgatcggagtgttattgaaaacaccgttcatccaatccaaacgggcaaacggatcagggtctttttctttcaggcgctgaataagctctgtttgttctttgcccttatagtcaggacccgtcataaaggtatgcgataccgtataaatcttcccgccttctgataacgcatatttttcatatgtattagccgtcagcaccgccgtcaagagaatgacggcatagacggcggacaccgcgcctttcagtcttgtctttgctgcaaggaaagcggcaatggtcagccccagaaggagcaggataggcaggttggcctgatcagaaatatccaggctgaaccgtctcacttggctccaatagagcagaacggcgagtacggcggatatcagcatactcttcatgctgatgtctgaaagcttagaaagccctgctgcaaccgttccggcaatcgtgaagcacaggacgtattcaaacctgttttgcggagctgaaaaaccgttaaaggcgcttgccgcaaacggactgaagtgaaacagaatgtacagcagactgattcccgcaaacagccggaacagccggtttttatataaagaaaatgtaaatagaaaaagtaaaaaaaccgccggcagaatgattatccggcttgaaaataaaatgttgtcggaaaaatcaagccatgcaatttgctctgaatacggcggccgcagattatgaagatatccgtatacgacagggataaaggaaactgcgcttatgccgaacccgagaaggcccgacagaataaatatcctgcattgagcgagccttttcgcctcattgccttcaagggggatcatccacctgaataagatataaatgccgatgaaaatcagattaatatacgcaaaataaaagttgttgatcaatgtcagcgcacaggcgaagataaaccacgccggctttttttccctgatgattttttccgcgccgagcacgagcagcggcagccacaccatactgtcagtgaaaaagtcccaatacacctcatgccggaagtagataatcgagaccccgtacaacacggcgccggcaaaagcaggcaccgtccgtttgacgaaatagcggaacacacacgccgccgtgaatatgatgaaactctgcttggcgatgctgataaaaacggaggcctgcgcccaaaacagcgcatcagcctcacccgtcagctgaataagctgcaaaaagcggacagcggcggagataaacaggaatagaaaagaagtagagaaataatagccgagctgactgtacactcccccgcccagtccgaacgaatagctgtaaaacagcctgccgttcatatattgatcaaacagcagctttttgaagaccgccatttgggcgatcccgtctccagaccccgtcatatagcggccttccgaccactcttttaagaaaaaaatatgagcggctgccgcagccagcacacaggctgccggcaagatccatttattttttttcatacaacgtccccagaccctgcgcacagcggcggctgtttaatggttccacttgcgcttttttgtataattcgtttcattttgttctccgtacgttatattcgcttctttaattaaatagtgcgggcgtttttttgtttcatagtaaatccggccgatgtattctccgatgatgccgagactcaaaagctggatgccccctaaaaacagcacggcggaaataatggtgaagtatccgggtacggacacgccgtgtgtcagaatatgaacaaaggtcgttacaatataaaccatcgacagaagcaatatcagaataccggtgaaaaagcataccctgaggggcttgttgttgaaggagacgacaccgtccattccgtagttgaacagattgctgaatgaccatttggacgtgccgttcttcctttcgacattttcataaaatacgattttctggtcaaacccgatccagcagaacagccctttcgagaaacggttcccttcactcagcttcaaaagggcatcaacggcctgccggctcagcaggcggaaatctccgaccccgtcacgcaagtccacttcgacggctttgttgataaatttataatacagggaagaaagcacggaacgcacggggctgtccccttttcggttgcgctgcgcgatgacttggtcatacccttcttcatagccttgaatgaagtctttcagcagatgggtcggatgctgcagatcggcgtccatcacgattaccgcttcgccctgcacgtgttcaaatcctgccaaaatggccgcttctttcccgaagttgcgggaaaaagatatgtatttgacgcgatggtttctggcggccagttctttaatctgctgaagggtgtcatccgcgcttccgtcattgatgtagaaaatttcatagtcataatgaatcgtctgaaattctttttttaaagattcatggatgagcttgacgttgttcccttcattgtaagacggaataataattgagattaacctttgtttcatgaaggcaccttctttgtattattctttttttaggacggccttaaaggaattgtccgcaaaacttcagtaaggcttttcctttttttaatgacgtttaaaccctttttttgttacagggaaagaaatttttttctgcatatgatttatattttgtcatgtttttcggcagatatgagaaaaaaaagaaaaagtctgtacgcgggacagactttattgctgaaggtattcatgaatcaaatggctgacgatgcgcggtttttcgtgaatgacccaatgtgaggcatcatctatgaagattaagtcgccgtttggaatcatccgttttgtttccttggcgagctttttgctcagcgcgcggtcgttgacgccccatattaaccggtacggaacgggcattttaagcggaacggcagggcctaaaccgccggctctgatcgcccggtaccagttcagcatcgccgtgagcgctccttttctgccccatgcttctttgtagctgtcgacatcttcccgtgaaaaaagcgccgggcgttcagataagccgatcgcgtgatccaatacgcggtaatcgtcttcagacaatctccgttccggcttttccggaagctgaaagaaagcgatataagagcttttcttccactgcggcgggtagaacggtgtgaccttccgcataaccgccgggtgcgggatattgaccgtgatcaatttttcaacgttttgcggccgcgtggatgccaaatgccaggccacggctcctccccaatcatgtccgatgacgacggctttgtcatctgtaaaatgagtgatcagcccgataatgtcgtctctgagcgtatcaatggtatagttttcaatgccctccggtttgccactgagattatagccgcgctgatcaggcacgacaacatggtatccggcatccgccagcggtttgatctgactcttccagccgtaccagaattccggaaacccgtgcagcagcaccgccaaaggaccgtctttcggaccggctgaagccgtgtgcagcgtcactccgtttgtttcgatcatgtgaaacgtaatgtcattcatcgattctcctccccgtttgtttcaatcttctttctgttaagacgatgatcagtacgctgatcgcgatcaacaatacggcctgaacgatcagggcgaacggctgagtcagccggataagcaggctgcccgcaaatccagctgccgccgaaataaggccgaacagaatcatgaggagcgcactgaatcgattgccttctttccactgcgactcatccgccatagagcgcttcgtccgatatccgtacaggctgttgatcgacttcggcggaaaaaacgtgactgaaatgccggccgcagccatcagaaggccgccgattaccattatcatatccgtcactctccttttcatcttttacgaaaggaaaggcgaaaggtttcagaaaaaaagcaggcttattcgcccgcctgaatctttacttttgagttaagtcggccgtttttacataacctgctttcccggcgtatgtgacgtacgcccatttacggtcaaatcctccgtcatggctgaacccccagccgagcacattgacggtttcacccgctttaacagacccttttttgccggtttccaaagtcggcgtataaaaatcggtttgtttcgcggtcaccgccttcaccggctgcttcatcagaaaatgcgtggaaatataggctttgtgacctttgtagtcaatttcagcccaatctgctccttgaagccgtttaacctttacggaatcctctgaacgaagcgtgccgataatccgcccttgtttattgggttctttgcggacgttaagttctcctgctttcacgatatatgtatctgctgcggtgtctatttttgtctgatgaactgctgcggcattcgctgccggatcaaaaaaaacggtgcctgcggctaaaaataagcaaagtcctgcggccggaataaatgcggttaacccctttttcatgttcattgtggttcctccccgctattttataagttattacacatttccacattccgccggtcgtcaaacatgattttcccatttcttttataaaaagaaaaaaccgccggacggtatccggcgggcgcactgctatattaatgcaggagacccctgctttgatccaaataatgagaaacgtcttcccgaacgctttggaacatatggagcttgctgccgtatgattcgatccattccttgacgacgcgttccgtcatttgctctccttggtacgggcggccggcttttgcgtaagtcgcttcgaaatctccccataaaagctcaacccaagtccgcgcttgcaaatagctgagcatgtcatttttctcaagcagcaaattcgtcagtttgtcgatatatgtattcatgtctctgtctcctttccttgggaaaacctgctgcttttacgcagcttgtcacaggcatatactaactttacgtcttcagtccagaaggcgcaaccttttgatattggccgagggggaaaacaaatggtccggaacaaggcaaaaggatttcctaatcagaacaataataagtttgaaggcgaaccgcgggcaaaggatgactacgcttctaaacgggcggacggttcaattaattcgcacccgcaagagcgcatgagagcttcaggcagacgataacacacaccgtaagagaccgggaatgacccggtcttttttttgcggaaaaaaacatcctcttgcggtcataacgctaaataaattccataatatgttaaatgctaaaccgcaagccggtagacaaaaaaggaggggttttataaaatgaagacagtttcaaaacgattgctgagccttaccgcattcttactgtcagtttcattatttgctgtttcagcagaagcagcgggcagcccgcagacatctgtatcaaacagcggtgaggagtttgacgcaaatcagaatcagcctgtacaaacaacacagacatcccccgcttatgaaggaacgggcctcaccaaaagacagcttgcacaaaacagcaaagctgacatcaagtcattaaagccttccagtattattgggacagacgaacgaatcagaatttctcccacaacatcatttccatatcgcgcgacagcacagctgaccgttacatacagcggcagcacaagcacctacggatgcaccggtttttttgtcaatgctgacacgatcgttacggcgggacattgcgtgtatgatcagaaaaacggctgggcatcgaaaattacggcagctcccggccgcaacgggtcatcgtacccgtacgactcttattcaggcaagacattctacagtgtcaaagggtggacagaaaacggtgacacaaactatgactacggcgcaatcaaagtaaacgggtcgcccgggaatactgtcggctggtacggctatcggacgaccaacagttccagtccggccgggctttcctcaaccgtgacagggtatccgtgcgacaaagtgtccggttccatgtggtcggacagcaagccgatacgttctgccgagacatataaactcacttacacgacagatacgttcggctgccagagcggatcgcccgtttaccgcaattacagcgacaccggccagaccgccattgccattcatacaaacggcgggtcgtcttacaatctgggaacaagggtgacaaacagtgtattcgacaacattcaatattggtcaaatcaataaagcttttgtcttctttctcgcggcagccgttttatgcggatgcggcaaagcggatgattccgccgccaaaaaagcactgcccgttacgctccatgttgagaatgcagacggttcaccggcggccggtgtgacggttaccgtgatgaaagcggcggagtcagatcatcagccgaatatagaccgcggagagataataggcaagactgatcaccacggtgagatgacatggaaaagcggcgcgaaaggaacctatgccgttgtttttgaaaaagacggggtaccggaaacccggaatatttccttagctgagagcgataaacatacggtgatcagcattacgttgaaacattgaaaaaagcttgcaggcggaatatcccctgcaagctttttgttatcctttatgcacttggtattcataaacatctttcttctcagacagatgagcgaacgtggaaagcacaaggccgagagccgtcatcagcgcaccgccggcaaacagccatgagtaagatcccgttcccccgagaatcaatccgccgatccaggcgccgagcgcgtttgccaggttaaaggcggaaacgctcaccgcagcggcgattgtcgtgccgttttcagaggaggaaataaccttggtctgcaaaagcggcggcgtgccgaacgcacatgcgccgaacaaaaatgtcgctgaaacggctgcggcgggaaaaacagcgatataaggaaaaatcgccaagacgccgatcaggccgatcatcacaccgatcatcgtgcgcgtcagcagtttgagcggcactttccccgcgaagaaattccccgccactccgccgagaccgtaggcaaataatgcgcctgtaatgccgactgtgccgaaccccgctgaatctcttaaaatcggctcaataaacgtgtaagcgataaagacgcctgagtagccgagaatggtgatcgcaaaggaaaaaatcacttgtttatgcttaaagacactccattcattcatcagcatcggaatcactttcggttttcggttcggtacgaccagcatcagtccgatcagcccgatcaggcctaaaacagaaataatgaaaaagacggcccgccagttaagggcatcccctaaataagagccgaacggaacgccgagcatcagcgccacggttaatccgccgttcatggaagccgcggcggcggaacgtttttcaggcggcaccatttcacttgcaaacaccatggcgatcgcaaaaaaagctccgtgaatggatgcggataaaattctggaaatcgccagcacggcgaagttcggcgcaaagacgctcatcaggttggcaagcacgaagatgcccatcaaccctagcagcaccggctttctcggcagcttaaccgcgataatagttacgatcgggcccgtcaggcagacgcttgccgcgtacgccgtaacaagcatgcccgctgaagatacatgtatatgaaagtcatcggcaatcgacgtcagaatacccataacagcatattccgtatacccgatggaaaatgtgcaaatcattaaaacaaaaatcattaatttcacagatggctgtttcattttgatattcaacgcaaatcgcctcctttttattaaaaaacaacgaattccatcttaaaagatatcaaaaatgaattcaatcattttttactgaaaggttgaaacgaatgtgcccgaaaagaaaaagaggccggaaccggcctcttttgttattatttttcttttaaaacggaaatcggcagtgcttcttccccgtcagacggggaagatctgtgtccccaggcgaatacgccgttgatgtaatcaatgcggaaagtgtcatcagaaccttctatctgatacaccccgccgggccgaaagtcttccgggttcagcatgtaagctttggccatcgtaattttccgttcaagcacggccagttcatttacaatgcccatctgttccgctttacgcgctttttccgtcagtcccgcaatttctgtctgtagttcatgaggcgtcatttgactgtatcgtttgtccatttcagtttactcctcttcctgcaagaattgatcaatatcgtcaatcgagaatccttttctgaataagtactgtttgaccttcattccgctttcatagctgccgtcatagcggtatttcctgatcgctttttccgcatgagccttcagagcttccatctcggcttcatcatcattttcatactccgtctgctccagagcggcattgatgacgtcgaaagggaaaccttttcgctgaagctgcatctgcgcccgctgtctgatctcttttgtggacagctttttgtcttttttgaggattttgccgatatgtttcagcgcttcttgtatctgctcatcaaatgtaaacgcgctgagcgtctccttgatggtatcgtcgtctattcctttcgctttcagctcgcggaacaggacgtcagggcctttgccgtttgtttttttgtgggtgctcgcataggcttcggcaaattctttgtcatttaagtagcggtaatcgtacagtttatggatgacttcagaaatgaccatgtccggtgtttcttttttcttcaggtgatcccggacttctttttcagaccgcatccgatatgataaaaattcaacggcgcggttaaaggcttttttcacgtcatcaccgtgctggatttcaagaatgtcaagctcgtccagttctttcccttttttcaggtcaaaacgcacaagcacgtcggcgtcgacgctgaatgcatatttctcatcaagaaagatgttgaagcgctcggtatttttcttttgggtcgatatttttgtaataaacggcatcccggtctccttccccgccccgatgttcaggcgtttttctttttggcaaatgaggtacagtatatgtatcaacgtgtaaggagagatggatatgaatatcgcgatgacaggcggcactggttttctgggccggcatctgacaggtgtgtttacccgccggggacatcatgtctatattttatcaagaaaacagagagaaaccgaacaaaaaaatgtgacatatgttcaatggctggccgaaaacgcggcgcctgagcgcgagcttccccctattgatgtatgggtgaacctcgccggcaaatccatctttgaccgctggacggacacaacgaaggaacaaatcatttcaagcagaatagaagcgacgagagaagtcagacggattatgaagcagcagccgaaaaaaccccgggctttgattcaggcaagcgccgtcggcatttacggcacaagcacagagaaaacgttcactgagcagtccgatacgtcaaatgaagactttctcagtcatacggctcatatgtgggagcgtgaaggccagaaaattgaagcgctcggcatccggacggtatatgccagattcggcgtgatgctcggtgaaaaaggcgccctgccgctcatggttctcccttataagctgttagcgggcggcaccgtcggctctggacggcagtggctgtcatgggttcatgtcgatgacgccgcggaacttattgcttttgcggcggagcatgatgacttgtccggtcccatgaatgtgacatcgccgaatcccgtagaaatgaagcaattcggaaagacgatcgcaagcgtcctgcaccgcccccattggattcccgtaccggaattttttctggagaaggccttgggagaaatgagcctgctgatcgtaaaaggccagcgcgccctgcctaagcaggcgctgacatccggttttcagtttacgtatgaagaacttgagttggctttaaaggatatcttatctgcataaaaacggaaataaaagccaatcctattggtattctgttttgaaggagggtcttcttttatggaaaagaagcgcgaaaaacatcagcagggagccaatctgaaaaaaatgcaggaagtcctttattccggtgaatttaaaaaagcggaaagagcagccaaacggaaataaactgaataaagatcggggccgggcagatactatgtttgtttgatatcacttttttcagggggcgattgatatgggcagaaatcatactcacaaaaaccgtgataaaaacaaacaaaaacttcctcaagttccggatgctttgaaacgcgaaacagacggcacgtacgaggaatattcaagcgagcttgctgattccgctgaccgcgaagcgcaggcgcggatgaaagccgctgacaacagagctaaaagcaaaacccgctaatacgaaatccccgcctctgtatagagacggggatttttttacaactcggtaaacaggctttttgccggcgtccgttctttcgccttaggctgttcatccggatagcccgtttgaatgatggcggcgaagcgctcattgtctgccagaccgaagtcttggtgcacctgtttgtcatacatgatgcggccgcttttccagaccatgccgatgccgttttcatgtgcgagcagctgaaggttttgaatcatgccgctcagcgccgcgaaatcatcgtttctcgtaaattcattttcatcttcttttaagacgacaagcaaaaatcccggaacggcgctgaggttttttctcatgttccgctctttttcctcgttgaaatcatcttttatttttttgaaaaatgagacgtagctgtccgcaagcttttctttacccgcttcgcttgctgcgtagataaaacgccatggctccgtcagtctgtggttcggcgcgtaaacggccgtttcaagcatatctaatatgacttcagaaggtacggtttccggcttaaacgaccggatggatcttctgtttctgattgtatgtgcaagactttcgttttgctgtagttgttcggttttcggcatgccgattcaccttcctattcaattgaaaatgattatcatttataatataacggatacgaccgtcttttgtaaaccgttacggaagctgaaaattgattgattcggcatacacggccgttcccgtcatctcgattttcatcttttcgttatcttctgtaatcctgatttccacttttccgtctttcccgatttcctggccttgttcaatcgtgaggcattcggcttcagagcctccgtattgccgcatataggccgccataacgcctgaagcggttcccgtgacgggatcttcggtcgttccggagaaaggggaagaaaaatggcgtccgtgcagatcactttccggatgaacggtttccagagaaaacggatgaacgctcgctttcggaagatcgcgcaaaacagcggggaattgtgcgttgtccggcaccatattccgtgatgcttgaagtgatctcagcggaacaatcagtgtccagatccccgttgatccgtaaacaatcggcagctcgctgtgaaaatcctcagccgtaatcccgagcgaggccgcaagcttttctttgtctcccgtaaacggcagaaattgcgggggtgcctgttcgagcgtgatgtatacccggccgtttcgttcagcggcttttgcgggaagaataccggcttttgtctcaatttgatatgtctgatcagcctgaagccttcccttttcaattaatgcgtaaagagaggcgacggtagcatgtccgcataaattcatttcgtggccgggtgtaaaatagcggatgcgcagatcggcttctccgcttttgcagagaaatgaggtttcattgtaccctgccatttcggcgatcatctgcatctcttcatctgaataatcatctccgttaaagacgattcccgcgggatttcccaaaacaggaatatcggtaaacgcttcatatttaaacacggttgcctgtttcattcatcagccttcctttcaccttatgatcatgttattcagtataacagagtaaaattagaatttttagttaattcttcaaaaaaaaagacgccttttaacggcgtctttttttggtttttccgatcaggcgggtgacgagaatcatcgtgacggacagcgatctgtttttacggtacgccaagtatttcccgcgccactccggtttgtatttttctttaaaggcccgcagcccgctgaagctgtacatataccggacgttgttgaaaatgacggccgcgattctttccgaccagaaagatgtaaaagccgttcctacgtttgacaaaggcgccatgcccatattaaaggtggtatagcctttttcctgcgcccagagaaacagacggataaaaagcgcgtccataataccgttcggcgcacttttccgataacgcatcaagtcgactgatatctcgccttcctgatacatcggcatcaggttggcaaaagcgatgatctccccttccgcgtctttcacgtaagcaatcggcgcctgttccagataatcccggtcgaagaaaccgagagaaaaacctttctcttttttcggtccgagccattcgtccgatatgtctttcagcttggcgataaactcggaggaaaacggcggttccccgacatgaaatgtgtagccttcgcggtcaaatttgttgttaatcgcccgcagccccgcttttttcttacctgacagcgtaaatgcttccatatccacgaacgcctcttctccgagcttgaagaagttatagccgaagtcatggtacagcgccagatcttcacgttcgatctgataaaacatgacactcagcccctgcttatgcgcttcattcagaaattcctcaatcacaagcggaaaagagtctctctgtcctgacggatcaccgagcacgacaagccttctggaaatctggccgaacaataaaagcgctttgccgtcgcttgagaaataaaaccgcttatccccgagaaagccgagatggctgagggcgtttccgccttcttccgccaaaaaggacttcagccgttcagggtcggccttttctccgatcggcttcgatcttttatgataaaagaccgtaaacaacaggaaaaacagcggcacaacaataatggccgtcatcgtggcatatgtaatgtgcgaattgttatgaacgaaataatcgtggcgcagcagccgattcattttatcccagataaagccggcaatgagattgtagttaaacaaggcgataataaacagagcggccgcaaaaatcatctggccgagcgtatacgatgcctgctctctgataaactgccgctttaacagcaccagcaatacgatgacgacaggcagaataaagatcgcgctgatgttcaatccttttaaaaaactgaacacaaaaccgccgaccagcgcggcaaccgccattgaataagaacgtttcgtccgtttgtataattcaatcggcaagattaaaagaatcaaagccgcgcttaacgataacgcgttaaacgcaaggagcgccgggcgcggaatatgcgggatgaccgtctccctgtcaatcggcagggcgacggatgccagcacaacgactcccgccatgaaaactaaaagcgacagcgaaccgtaaagcactctgattaagatggcgcgctggaatacgagaagcacgttcgtcgtttccacggcgggcgccatcttcggatttgattccagccgtttaagcgtattttccgttaaatcgccggccgcaaagaacagcccgaacacaaacggaataaatgaatacacaatccggtagatgacgatggatgtcacaaccgcctcctgcggaaagcccatattctgcataccgagcagaaacagaaggtcaaacgaaccgaatcctcccggcacaaggctgatgattcccccgatagcggcaatggcaaatacaccgaatacatggcggacatccgcgtgaatccccatgacatacagggaataatacatgacgacggccgccgcaaaccattcggcaaacgatgccccgatgtaagaaaaaaccggatgcctcggttttgcttcaccgtcttctgcgcgagcttttttattgttgacccaagcggcgattaaggctgccggcacaataagcgccactccggcgattacagcccacagccacggtttctcacctgtaatctctccgaccggcagaatgcgggcaatggtcaggatactgaagacggacagcccgagcagcgctgaggacgtaagccaggcgatgcctgcgacaaggcgttttacgtcattcgtatgctctttgtaaagcatcgtccgcagcccgacgcccgccagaccgccgaatccaaggacattgttaaaggaattggcgataaaggagaccctgaatactttccaattcggaatgtcgaggcgaagcgtccgtttcagcacaaagtcataaaaggacatcgcgctgacggcaaggagaccgagcagaacgagaataaataaatcgtaacgctcaatcccgttaataatatacagcgttcgtttaaaagaaaggtctgtcaattcctttttggactgataaatgactaaaagcaaaactgcaataggaaataatacttttaatatcgataaggcattctttttagtcagcaatgttctctccaatcatcataaaatagcttatttattataattcccccaataatctccaacatattatacactaccacctcacattcaaacaaaactcgtctgcaactttctttctctgattaaaatcagtaatatggtatgcaggagtatgaatgaggaagtgagacgatggattataatctgcatgatacaacggtattaggcggcgatattttttctcctgaggaacgggatatttgggtgctgtacatgaaagtgatgacctcggcgggactcggcgatgtgtcggagtggatgaagcttgatatgagcatgccgcaaatgaaggtgctgatgcttctgaacaaccacgggacgcttaaggtgagtgacatagcggagaaaatgggcgcttctctttcaaatacgacggggctccttgaccgtttagaaaaatcatgtttcattacacgcgctccgtcagaagaagaccgccgttcagtcgtcgttcaattaacggaaaacgcgaaagatattttccgcagcctttatcaaaaaggacatgtaaaattgaagcgttcattggaaacgctgaccgctgaagaaaaacaaacggtcaatcaaggacttgccatcttggcaagagcccttgattcttccaaacaggcatagagatgaaaaaggcctgccggtatcggcggcctttttttgtttgacatttaattcacttgaagtgaataatatattcgaagtgaattaaaaaaggaaggattgatcagtatgccggatccattgcaaacagaaaaaaaccagagccgggccatcactctttttacgatcggtgtgttcatggcggcgctggacaacggaattatttccgctgctctgacgacgattaacagctcttttgatgtttctccttcatggggatcatggggagtgaccctttacacattgggactcagtgtcagtgtgccgattgtcggcaagctgtcggaccgatacgggcggaaaaaactgtttatgatggaagtcggcctgttcggactcggctctttgcttgtcgcactcagtcagagcttcccgatgtttttggcggcacggctcattcaggcgcttggcggcggcggaatttttataatcgggagttcgcatgtgctggccgtgcttccgaaggagaaacaggggaaagctctcgggcttttaggggcgatgaacggtatggcggccgtcctcggaccgaatatcgggagctttttgcttgatgtaaccggatcgtggcattggctgttcttgattaacctgccgattgccgccgctttggttgtgtgcggcggtttgtttatcgctgaaacgaaagagcctgaggcgaaacggcttgatctcgccggcacaatgctgctgtctcttgcgatcttatcttgtatgatcggtatcacgaatctcgatgggacgaagctgtcagaaagcataatggacgtaaaggtgtatgggtatcttttgggagcggcacttctctttctggtgctgcttaaggtcgaaaagcgggttgaataccgcgggggcgatccgattctcgcctactcgctgctgcaaaataaagtgtttcaatggacgcttgtcatcggatttttatcgggagggctgctcgctgcggtcatttttattccttcttatgcggagcaatatttacacgtatcggcggagaaagcgggttattggatgacgccgcttgcgttggcgtcaggcatcggagcgtggctcggcggggcggtcacggataaaaaaggaccggtcttctccgcggttgtatcaggcgccatcgcctttgcgggcttcagcctgtttccgttatgggtgacggataaatgggaatttgtcacggcgagtgtcattgcggggatcggtttcggatttctgctcggggctccgctgaatgtgcttgtatcagaaacggcgggccaaaacaaaggaacagcgctcggcacgctgtcactcgtaagacaggtcgggctgacgctcgctccggctttatatgccggcttcattacagcgggctttgaccggatcggagaggacattaaaaaccgtttaacgaaaagcggcattcccgctgatcaggcgcaaacgcccgatatcggcggcggactttcttcgttgcaggagcaggtaagccgaatccccgttcccgccgtcaaaaaagcggtttctgatgcgattgaagcgggcatttccagcggctaccaccatctttatacggcagccgccgtcatttcattatgcacgattgtgtctgcggctgttttggcgtttttccggaagccggcatcctctaagacagatgccagcccatccgccgggaaagctcagtaatatgggcgatgtgatgttcagagtgccagacatatagcccgagcgcctgttccagcgtaaccgtctctttagatacaggatggaagtatgtccgtttgaattgggcttccgtcatggagcgcaaaagagcggcccatcttctgtgcaggatcgttaacagctcaagcgcatccccgcaagcggcggttttggaatcatgaagagcggcccagcctttttcatcataggacggatttccggttcattctccgttaagctcaatttaaaccgggtatagccgttcatgtggctgtccgccagatggtgaaccacttggcggacagtccatcccccttcgcggtacggcgtatcaagctgactggccgacatcgctctgacagcttggttcagtttagccggagcgtgttccagcgcattgatccattcttgtttctgtccggccgaaatcgattcagccggctgatactctccaatcggatggctgagggtttgtttttccatttttgtctctctcccgctgctcgtattatgaaagtatgatggtgatgtcgcagccttccgctttcgcttcacgaaagacctcaagcacactctcggcgccattttctgtaagctgcttgctttgttcaaactgtctccattctaaaacaagggggtactccacccatccggtcagacagtcccataaagcgtcaaggttttcaccgtagtactcaggaagggcaagttcctttttcaatgtctggtgcaggtcgctcatacttctgatttgctccccgttaataactgctttattcatgcgcggctcctttctcatgattctattctatcagtttaccattttcctcttcagaagtgaccggagtctgccgcggttccagctggacgatgccttgcccgccgtcaacggccaccctgtcccccgttttcagttttgacgttgcatttccgcacccgacaacggcaggaatccccagttcccgggcgacgatcgccgcgtgggacaaaggggcgccgacgtccgttatgatggcagccgctcttggaaaaagcggggtccagcctacattggttgtcgacgtcactaaaatttcccccgccgcaaaagaatcaccgtcttccggagcatcaaggacacggacaatgccctccactctcccggccgctcccgcgaaaccttttaaagtatgcgcatcatccgtttccgcaggcataaaagcatcgtaataatccgctcttctgtcaggatcctcagcccatttaaacggattgaatcttccgttaataacggatggaaacggcggcagttttttataggtttcatagttttgctttctcgcttgaatcgacgcaaccgccggctctttccccgcgagcagatcggttatttcatgcagatacaggaagaaaatatcgtccttcatgccggtcatttccgccgctctgagcgcgaatgctctggctgtccggtacactctgacaaattcggatctggttgtttctctaatattcgcgtattctgacgctttttccattttggctttgagccatttgaccttatgaggaaactttttttcaaatcttcggaaggcctgttcatgcgcccgctgctgtttcaaaagcagttgttcggcatcaatacccgactccttgtgttctttgatctgcttcgtcagccaatcccggttttctcccggatgcggtatggaaagttcgtattcatgcgggccacggtggccctggttcctgagatattcttcctcgctcatacggcctttcatgacttgatcaatgccgataatcggctccaggctggccagtccgccttttcccctcagattggaaagcaggagattcgcatcttctatgcctgcgagttttgttaattgagaggttaacgacgaagaggattgcgcagaatcacgcccgccggatattaacgcaaaccacgcgttgcataaatacggatagatctcatcgttccatatcgctaataatgcctgctccgtttcggcgcgtttcagcttttcctcaatattccggcaccactccggtgattcgtccaagtaggaggacatgttttttttcgcttgcttcattttcgacagatacggtttcagttttttcgggatgatcttcaataattcatactttgagaacggatataaaggtatcttcatttccgccgggatttctcccaatgtatcgctcatcatttttccaatttttccgcctttcggattcagaccgaaagcggcgagaacggaaagaggctggctcatattgttataggctctgccgcaaatattgccggaccagacataatagcccggaatgatgcccgactcttcatccagattccggaggagcgaccatgtcagcggcgtcatcacatcgggaatcgcttctcctatatttgtgtttgtccataaaaaatcaccgctgaaagaatcgttccattcataggtttccagatttccggcttgtaaggtcgtaatcgggcgggattgaagaatatacaatgtcccgcccgcggcggcccattcaatatcctgcggccctccaagatctttttccagctttttcgccagtttatagagctttgacgcatatttgcgaaattccccggggccgtcatattttttcttgggccgtgccagtttaaaagaataggcatcggcttccccggaaacgagctgctccccgagaccgtagacgtaattgcctgtcatctcccgcctgctccccgtaatcggatctgcggtaaacagcactccggatatctcagacggtatcatcagctggatgacgattgcgatttcatgctcatcttccattccctgaacggcgctgtacgcttttactctttctgactgtaccgaccggcggacttcatcaatcgccctggacatgtcttgatctgttctgacattcaacaccgtatcgaattctccggcaaaggaagcctgagcggaatcctcgctcagcgcggatgagcgtacggcaaacaacgcagatgcatggcggctgcggatggaattcacatattgatcaacagcctctctcgcctgatggcggagctgtccgtcctgaaaggctgacggcaaaatcacaaacccttcaggcacaggatacccgctttgatacattttagagagaatgcttccttttcctcccgcaaaggaataaagttcggccggaagttctccgaatgttttgacacagtcattcataatgtccccgctcctttttagtcgttcatccaagctcacagtttttctctttttcactttttttgaaagtatttcctataagtatacaatatatcggtcttcacaagggagaaaatcggtggcgttattttgtcataaatgcatccgtcaaaacagccgcaggcgggggctttgtatgcaggatgtacaactatccgtcctcgtgccggataaagcggacccgtatcaaaaaggcggccgaagcgccgcctttttttcagactgtgcggccttgatgcgccgccgtatttcttttggtctgcttcggctgatacactttcccgacaaacaggtatccgtatctgaaatggttgcacccccacgatacgaaaatgggacctagcgtgcagatcaaaaataaaagaaggatggcagccgctaaaggcattgaccgcaaatagccttccagaagatatccgctgattaaaaagtaggagtgcagcagatagattgaaaacgaatagttgctgatcatcatcacaatcgcgggcacttttttgagctttgaaaacagatgaaaacacagaaagatcatactgaccgcgtaaatcataatatccggacgcttagaggaaatggagccgccgctgatatatgaaacggccacaatcaatattgccgatacggccgcactgaagtaaaccgcataacggtactgattgatgagcgataaaaaacgcggatattcctttccgcaataaaatgccagacagaaataaaacacccagcccggaaacggaacccaaaagaacggaaaaatagaatcaagccccgatgatgccggcggatgaaagatggaaaagtaagccagatagacggcgttgatgataaacgaaacagacagcacccacacgggggatgtgttgttcagccagcggtgcagcagcatatggagaatgtaaaattgaaagatcacaagaatgaagtagccgatgaagtttcctaaaaacacattttctaaaaatttaccgatcactgaaacgaatccggctccttcttccgccacgcttttcattaaaatggcatccaccgcggcaataaacagaaacggcacgaaaatgactttgccccttttctttaaaaaacccgctggaacgcctttcgggtatgacctggcaagcagaaattccgaaataaagataaacgccggcgtgctgaacatcaagagggtccgaaacgcatcaaccgtatgggcggcactggctaaggactcttcctgaatcatcagcaccattgaaactgcgtgaagcagaacgacacttaaacaggacaggcagcgaatcacgaaaatttcttttatctgcatgcggccgctcctttttcacaagcgcgccggactttggcgtatgcttggcgcagccatttttcccgcagttcgggtgtgctcgttctgacgacagaaaaaaggttccgctcggctttttgaatgccgcaaaattgcagaatgctttttttcagcgtaatccagtccgagtttttccggaaccactttaagtaccagcccggggagtccgccgtataaaagacctgtgccgtctctgcccggagcagtccttttacgcggccgttttcatatgtgtaggcttctccggcgacaagcactctgtcaaaaaagcctttcataatcgccggaacgcctccccaccacagcgggtagatgaaaatgagatgatccgcttctttcatcagtttccggtatttcttcgtttcagcgtcccggttcatgtcagagcgctttttttcgccgccgtacttcagcacgggatcaaattgatcggcgtataagtcaatgaccgtatagctttggccgctgtcctttaaagccatggcgacgtattttacgagagccgcattgaaactgttctcatccgggtttgcatacacaatcaccgtcttcatatgtccctcccagtatttattaatttttacaatgattatatcatgatgtcatatgaatgaggcaaagacacgagaaaggctttttccagttctgctgccgtttcgataacccctttctgcatatttttgctgattttggcgccgcggattcaatgataagcatccggtgcttctgcgtttttgagcggccgtatggtatactagctgtcaaatgaatgggcttggaggacaacatgagaattttaaagtacgcgattttagggcttttgcgaaaaggcgaattgagcggatatgatatatcgagctattttaaggaagagctcggccagttttggagcgcaaagcacagccagatttatccggaattaaaaaaactgacggctgagggatttattacgtttcgcactgcgattcaaggaacgaagcttgagaaaaaaatgtacacgctgactgacaagggagagctggagcttgctgcctggctgacgaaaaaagacccgattccggaaacggtgaaggatgaatttatgctgaaggcttatttcatctcagctttgacgcaggaagaagcggatgagctattcaccgatcagctcgtaaagcggcaggagaaattgtccgatctggaaaacagttatcaagaactgatgacatcgtccgcggaggcggattcattttcttctcctgatttcggccattatctcgtgctgacaaaagcgcttgagcgggaacggaattatatttcctggcttgaagatattttggctctcatcaaaaaagcataaacaaaacggggcggctctgtatctgcaggccgcctgtttacgttctgaggaccgcattgataaacgaatcagccattaaaataagaaaaagcagactgaaataaacaatcgaataaaaaaacatccccttcgaccattgcgtgtcatccgccgcctgaaagcctttgacgctccggtacagccagatggccccgagcaggagagcggacgcggtataaaacgggctgacgtctatataaagaggaacgagcagcgaaaccgcagtcaaaacggcgatatagcgcagcatttttatttttgtgacgcgattgccttttatgatcggcaaaagcggaatgccggcggcacgatactcttcctttcgcctgattccgatcgcccagaaatgcggcggctgccacaaaaacataatcgcgtataacaaaatcgcgggcatatcaatgtacccggccagcgcgcaataaccgattaaaggcggagccgcccccggaaagctgccgacaaatgtgctccagacggattgtcttttaaaccaaagcgtataaacgacggcatacagcaaaaatgcaagcaggccaagaacggcggtcagtacattaagcgaagcaagcatgatgaatccgcatacgccgagacatgtgccgtacaggaccatgaccgtcggcggtattcttcccgtgacgctggcgcgggtgcgggttcgctccatctttgcgtccatgccgcggtcaaagaagttattaaaaacagtgcttgacgccatgactaacgccgtgccgatcatggcagccgccatggcggcaaatataccgggccctccgtccgtcctttccgactgaagccacgcgatccaaaatccgcctaatgcggcgagtgaatttgagatgataatccccggtttggcaagaatgataaagtccttgaacgtcatccggtttccgttatgcttcatagactgttccgtctgtgctgcatttgaattcatttgtggaggttctcctttttcggcttatcatatcaggaagaatcaggaagtacaatttattttgggcatttttcacacaattgtaaattgtatatgaaaagccgcatcttgtgaccggatgcggctcttccctttttctattcaaagtctgcccatacagctccctgatccgccgaacggacacccattttcaatccagcggatgccctgagttcgggccggcgatggcgggctccacgcgtcatgtttgcgcctcactgagatgttcgctctcttcagtcacacaaaagccgggtgtatattgcaaatcgacgttcttctttcccgagcctttagaaaaataaaaacccttgccggttagacggcaagggttgtttcttacagtgtaaatgcgatatccgcccctgatacagggtctttgacgaatacgccctcttctctttcttcgatctcaaagccggcatcggtcagcgcttttgtcacacgtgacagctctttttgatgcggcagcgtgatggtgtaataatccagcccgcttgcatttcccggtttcggcggcgcatgttttccggcccatatattcagaccgatgtgatggtgataccctcccgccgaaacaaacagagcggacatgcccgcgtaattgccgacaatgtcaaaaccgaggatatcggtgtaaaacgctttggcttcctgtaaatccgtcacatgaagatggatgtggccgataacggttccttccgggagacggcttttccgttcagctccggcttcttccaaaagcccgtccacatcgacgggcgccgtttgcatgacgtaattgccctctgcatcccggcgccacgtgctgcggggacgatcggcgtatatttcaatgccgttgccgtccggatcagacaagtaaagagcctcactgactgcgtgatccccctgcccgagcgcgatgccgttttcaatcagcctggccaatgcgatgccgagttctttccggtcaggcagaagtatcgcgaaatggtaaaggccggtgacagaccgctccgggagaacgacggcgctcggattttcttcaagcaccagcaggacgcgttttccgtctgctgacagttctgcagaacgatctgtctgcgagatgacttgaaggccgatgacattccgataaaagccgagcgagcgttccatatttttaatcgtcaatttgacataaccgattgctgtatcttgatgaatgccggtcatttgaacgccttctttcttatgctgaaaaagtttctcccttttttgatttgaaaaggagctgatccaatgaaagcagacggcttcctgaaagcgctaagtgaattgacgcaaccagtaagatgaaatcaaattccgatccgcccataaatggtgaggaaagcttcgccgtgaagatggcgccgactaatgtgacggcaaacagaacgccgataatgcgcgtcgccaaaccgaaaaagatcagtaccccgccgacaagctcaatcgtcgcgatgacgtagaccataaaggccggaagcccgatgctctggaaaaattgcgtagttccttccaacccttgaaacttggataaaccgtgaacaaaaaagataatacctgttacaacccttaaaagcagtgttcctgtttcgaatgatttattcataaaatcctccttgaaaattattatcacttactttatgtaagctagtatatatacataacttatttacgtcaagtaattttgttacatttaacgaaaataacttaaaagtactatttgtcttcgcaaaaaaaagacctccgcactctgtcggaggtctttttccctacctatgattcccggaactggctctcatataattcccggtaaaacccgttctggctgagaagttcggcatgggttcctttttcagccatttcgccgtctttcagcacaagaatctgatcggctttttgaatcgtgttcagcctgtgagcgatgatgacgcttgttctgcccgccattaaacggccgagcgcttcttgtattttcacttccgtcaccgtatcaatgttgctcgtcgcttcatccaaaatgagcagcaccggatccgccagcacatctctcgcgatggaaataagctgtttttgtccttggctgatgcccgcgccgttttgggtaaggacggtatcgtagcctttcgggagccgttcgatgaatccgtgggcattggcggcttttgcggctgcctccacctcttgatcagatgcatccagacggccgtaacggatattttccctgatggtgccctgaaagagaaaggaatcctgcaggacaaaccccatgttttttctcagactggacctcgtcagttttttgatgtccgttccgtcaatgaggatttttccgttattgggctcgtaaaaacgggcgatcaggctcgtaacggttgttttacccgctccggtcggtccgacgaaggcgattgactgtcctttcggaacgctgaaggacagatgttttaagatcgggctgtcttcctgatagccgaaggagacatctcggaattcaatctctcccgttttgatcggctggtgcgtcgcatgctcttcatcttcccgctcctctttttcatccagcacgtcaaacacccgctcagccccggcgatggccgataacatcgtattgaactggttcgccaaatcatttaaagggcgcgtgaactgccgcgagtattctgcgaatacgacaatggaaccgatcgaaatccaccccttcagcgcaaacagcccgccgaccgccgctataatcgtaaagcttaaattgtttaaagagttcatgactttcggaatgaatcccgaaattgtctgcgcccaaaagcctgatgattgtaacgccgcgtttttttctaaaaattgctccatgacgcggtcttccctcgaataggctttaatgaccttcgctcctgatatcgactcttcaataaaaccgttcagctcgccgaggtttttctgctgctgcttaaacaggagtcccgtccggttggtgatccatttaatgctcaaaagcatgatcggaataatcaaaagcgtgatcaatgttaaaagcgggctcatgaacagcatgacggcgattgtgccgacgaatgtaatgacgctcgacagcacttgaatgacggatgtatttaaagtggagctgacattttcgatatcattggtaacccggctcatcaaatcgccgaggcgctgtttatcaaaaaacggtatcggcagctcatgcagatgggtgaacagctcgctccgcattttaaacacggtgctttgcgagatattgatcatccaatagttttgaaaccataaggacaatgattgcacgaggtaaatcccaaacagtatgaacagtacacccgccaatccgtccgtcgtccgtccgacgataaaatgatcaattgctttcccgatgacgaacggtccgagcaggccgaatatggcgcttatgactaccatgatgatcacaagggttaaaagcccttttttctcggctacatacgaccagattctgcgcagcgtgccttttgtatcttttgctttcgcgcgttttctgccgccttcatttgatttgagcggtattttcggatatcggaaaggtttacgaatgtctttctccactgtcagctccctcctttccgaattgtgattcataaatctgccggtacagatgagactgtgccatcagctctttgtgcgtgccttttgccagcaattcgccgtcttcaagcaataagatggtgtcagccttcatcgcggtggttattttctgcgtaataatcagtgtcgtgcattcataggatctgatcgcttgtaaaagcttcgcttccgtttgaagatcgagcgcgctcgtactgtcatctaacagcaggagggacggctttctgataaaagcgcgcgcgatggaaatccgctgcttctgcccgcctgacaaattgacgccccgctgtcccagcaccgtgtcgtacccgtttgacagcttcataatcgtgtcatggatttgcgcgtctttggccgcttccattacttcatctagtgaagcttcctcccgtccccaggcgatattttcacggattgtgcccgaaaacagaagcacttcctgcggcacatagccgatttccctgcgcagcccgcaagcggagaattcaccgatcggtttgccgtctatgaaaatactgcctgaatcagccgtgtacaggcgcggaatcagctgaaaaagcgttgatttccctgaacctgtcgcgcccataatggcaaccgtttctttcgggctggctgaaaaggacacgtgatgcagcgcgtctttttccatgtccggatagcggaaggacacttcgcgaaactcaatcccgcctgcaagcgcccgcgccgggtcgtgccccgttccctcgccgccttctgtttccagcacctcgccgattctttccccggaagccttcgcccgggaaaataccataatgagaaatggcaggacggacagcgcgcctgtaatccgcgtcgcatagttaatgacggaaacgacatcgccgacctgcgctccgccctgagcaatgcttttggcgccgaaccataagataaacaaaatgcagctgttcatcagcagcattaaaatcggcatcgccgcttccacgagacgaaaagcggaaaccgttttttccatcagcttcgtattcgatttcaaaaaacgtttcacttcgtggtttgcacggaggagcgctttaatcagtttgatcgccgtcaggttttcctgcatgatcgtgttgacctgatcaagccgcttttgcacggaccgaaacagcgcgccgcctcttttcagcacccacagcaaaaacaaaagcaaaaccggcaccgtgatcagcagaaaaaaaccgagtttcgcattgacggtcagcgagagaataatgccccccgcaatcattaacggcgccctgagcataaaccggagactcatgaaaagcatattctggacctgcgtcacatcgtttgtcagcctggtgataaacgacgtagatgagaattgcgcaaacgtcgaataagagaaggattgaattttttgaaaaagcccttttcgcgtatcatacgcatagctctggctgatgtgggcggagtagaatgaatttaaaattcccgatgcgaatgaaacagcggtcagtccgatcatcaccccgccccacagccaaaccgtaccgagatcctgctttaaaattccttcgtcaatgattttcccgatcagcaggggctgtatcagctctaccgcaagctcgatgagcatgaaaaacagagcgattcccgccaaaagggaatacggttttacatatgataaagcctttgacatgtgtaagcctccaaatcctttgttcaatattattattttatgcctttccggcaaatgaataaagaaatttggtgtgccgttttttcaataatctgcgaaaaagataaaaccttcccggggaggggaaggttttgaccttattgatccaattgctgttcaatgcgctcccgcatttgcggaacgcctaatccgacaatgacctgaagcgccctgccttttctgacgacgccgtgggctcccagctctctgaaatcggcgtcacttttgacctttgattcatcagcgacagtgacgcggagacgggtggcgcaattggtgacctccgtaatattgtcctttccgcccaacgcttcaatatacaaagcggctgtatcccgctgtgtttcgtctgccgcagccgtttcttttgaagcctgcttccgttctctgtactcctttttcgaatagagctttgtttcctgcccttcctctttttctctgcccggtgtggcgatgttgaatttgagaatgaggaaacggaagacgaaaaagtaaacagcggtaaaacacagcccgatgatgatctggtatacatacgtcaaaccgtggcttgacgccagcgggatccagttcaaggtcgcagcttcgatcaaaccgcctcccatatttccgacgacgcctgccatatacatgacggttgccatggaagcggcaagcaaagcatgaaccgcaaataaaaacggcgagataaaaaggaatgtaaattcaatcggctctgtaatccccgctacaatggacgtcaaggtgaccgggatcaaaaggccggcgacgatttttttcttttcctttgaagccgtggcgtaaaaagcgagcgcgattcccggaatgccgaagattttcgagttgccgtgaagcgcgaagcccccctgcgggaacaattctttcagcggtttgacgctttgagagtattccccgagatgctgggcccaataggtgacgataccgccttcagccacagccggaccgtaaataaacggcgagtaaataaaatgatgcaggccggtcggaattaaaatccgctccaggaatgtgtaaatccacacgccgatcgccccggaagaaacgagaaaactttgcagcgatccgattccggactgaaccatcggccatacgtatgccaccgcaagtgaaatcggtatcataatgaagaaagaaatgataacgatgtaggaagatccttgaaaaatccccagaaaatccggcagttttttatcaaagtaacgattgtgcaaatacacgacaatagatgaaataaagatggcgccgataatattcgtatcaagcgttttgatgccggcgatcatcgtcagcccgctcgttccgccggcttcctgagtcatatcgacatgaaaagccccgccccaaaccgtcagaatcgcattgataaagtaattgaatgtcagataaactgtaagcgcttccaaacaagcccgcgcctgcgcttttttcgctaaggcgacagggatgccgatcgcaaacaggagcggcatttgattaaagacggtccagccgccctgttcaatgacgtaccagcattgataccaaaacccgtcaggatcagccagcggccccatcagcgttttatttttaaacagcgtgctcagaccgacaataataccggaaaatgcaaataataaaacaggcacaaacatcgcgctgccgaagcgctggactttttgcatcatttcacgtgacctcccgctatttatcaaaattttcgagctctttataatcaacatatgcacggaataacgcttcgcccaccagaaaaaacggggcaaatgcgacgatttccgttttatcgcttaacgtcaccggcttgctggtcgcataaagattatacggcgtcgtttgcgccagtacgttgtttttcagattggtgattgaaataaacggaactccctttgcggacagggtccttacctgcggaattaattcgggtgtttcgcctgataaagaaataatgatgaatacgtcatcaaccttaaaatcatcacacatgatattaaactctgtgatgtcctgaattaaaatcagatacttccgccgggatacaaacatccgctgcagctcacgggcgcacaccctctgagccgtccccgatccgtaaacgaaaatccgttttgcttcatctatcagccggcacatctccgtcatatcttttgacttcacgtattttacattggcttcaatatcatccagcagcttttcaaacgtcatattctcgccctcttcaggctgatcctcccatttcagaaaaacacggaattcactatagccgctgaagcccagtttttgggcgagccgcaggatggaagaccgagagacattacaggctttcgccatgtcattgataccgagatggtagcacgtatgtttatgattcaatatatattttaaaatataaaaatcgttgtcatttaatttcgcgtaatgctgattaaccagttcttcaagactcatcccaaaaatccccccgttttctttctattatatagaataacagataaagaaaacggggaagattgtcatcaggaaataggagacgggcttacatcaagctcaggccagtagtccttattagcctccatcagatcttcaagaatcagtcttgccacacgggcattcggcactgtttttgacaggatcagcgcctgccacagcttttgaaatgaccgctcttcccacgcttcagccgtcagtttttcgacagacacctgctgttccatcaggcctttttgaaattgcggtatgttcccgactgagagcggttccggtccgtttgaacctacgagacaaggaatctcaaccatggctgacggatcaaagtttgcgatcgcaccgttattttcaacgattaacagcattctctccccggtgttataagcgatggcccgggcaagatcgacgatataggaagcatgatcatcaattttaatttcactgttctccgatgattgttcgcgcgtaatcatatcgcattggctgaaaatgaaagcttcgcgcccttccatgacttcgttggctctcgtatggttcggatttgattttttcaccatatcatccgggaataagtaatattgcagatatgtgttcggaagcgtatccggatcagccgcctgtacgtcgcgcgcttttttgaaggtgtcattccagcttgcttcagtctgttcggcctccgtcttcggaacgtagccgtattcacggacatgctctttcagcttcggcattaaatcattgccttctcgatccgtgatggacgtccaccagccaaagtggttcaagccgtagtaacggacgttcatttcttttcgtgaagataatccgaggatgttcgccatgcgatcctcaattccgaccggcatgtcgcagatgttcaatatttttgaattcggtctgaggcgccgtgtagcttcggccacaatcgccgccggattggagtaattcagcatccatgcgtcaggcgagtacgtttccatataatcaagaatctccagaacaccgccgatagagcgcatgccgtatgcgattccgcccggcccgcatgtttcctggccgaccacgccgtacttcagcggaatttgttcatcgagcgcgcgcatcgcatattttccgacgcggatatgcgccatgacgaagtcaacatccgtaaaagccgtctctgggtcatcagtcgccaaaaattcaatgtccggcgctttttcttttatgaatacctcacacgcacccgcaatccgctcctgcctttctttatcattgtcataaagtttcagctttctgatcggaaactcttccaggtgattcaaaagcattaatacaattccgggggtaaatgtgctgccgccgcctgcaataacgattgagaatgatttgtctgtcatgtgaagccctcctctgataacgtttacattttatttatatcatgagaaggtccgatctgtaccgggtttgaaggagttagatcatttgatcatttttagttatttttctcaaaaagcgggaaagttcccacaggtacgaaaaaggcctgctgtcatcagcagaccccttctcaaaaatgctcttgtaaatcagaaagcagcacttcctgctcaaattgtggatttccgatcggaaaaatcctggctgtttccttgtcttcgttgacatgctgaatataaatcgggactccttcatacgtcacatacgccatggcggcggattccgaaatgtctttcgcacgctgtgtattcacgtctcaaacctcctttagtcctcacacataacgtgtccggcacccaagagaagtatgcttgtttcttacaattgtccggcggtgagtttgaattttttgaggcgtttgtaaaacgtgctccgcgggattccggccattttagcagccagcgtgacattccccttcgctgattcaagcgcgtttacgatgatgtttttctgaatgtgctcccggatggagacagaggacgcttcttcctgttcataagactcggccgcttctttaagacctgacgcttcaagcagggctgcgatggggcgccctgacagccgtccgtccgggaacatgacggaaagacgttcaaatacattaaacaattccctgatgttccccggccatttccggctctttaatacgtctaaaaagtcaacaggaagctccccccgccagccgcgatttcgctgaaattcaaggaagagtccgggaatgtcttcggtgcgttctcttaatggagggaggtggatcggacagacgtgaagccggtaaaataaatcttctctcagctttttgcattcgacaagctgtctcagatcagtgtgggtggcagtgatgattctgatgtcaacgggaatctcttttgtcccgccgaccggggtgactttccgctcctgcagcacccgtaacagagccacctgcatggagtgtgatatttctccgatttcatcgaggaaaagcgtgcctttatcggctttttgcaaagcgccgctatgtcctttccgtttggccccggtgaaggcgccttccgagtagccgaacagttcgctttcaatcagcttttcggggaccgctccgcagttgacagcgataaacgggccgtttttcctggagctgttgttatgaatcgcccgggcggcaacctcctttcccgtcccggtttctcccgtaagacaaacggttgcgtccgttcgggcgacaagctccagctgctcaagcatatgtcgggatgacgggcttttgcctgccgcaccatgaaatataaacgacggcttttcttcccgtttggataagtaaacgcatgtgaagccgttctcctcccgcttcgtccgcttgatatgatagccctgttcctcaagctcgcgcagcatatgtccggtaaaatgctgaacgggacggcttgcggcgataacccggctcatttcattgcaaagcacgatcggatcatgagaccgggtaagcccggcgaatttgctgatcatgtcaagttctgtcattttgatctttagggcaagctcccgttccgccgtataagcgatggaggaggcaattccgagcataaaaggctgagcgcgggcggcggggcaggaaatatcaatgacacccgccagccgcccgtcttcataacggatgggcgcggcggaacagctccattgatgagaagcgagcgaataatgttcagagccgtgtatcatgaccggttcatttgtataaagagccgtcccgatcgcattcgtgccgacggccgtttccgtccagcgggcgccttttaagaaattgatgcggttcgcttcatgaatggtgcgcgggtggccgtcaactgaatggacaacgccgtctgaatcaatcaggagaaccatcatttccatttcccgcatcgctgttttcattctttctgcgtgcggcattgaggccgctaaaaataacgcatgcttttcggcctgcctttctaaatgatctgccggcattacattcggtcccttttctagataagggttgacgtcggcttttttgcagcggtgccatgaggcggccacccgcttctgaatacgggattcatcgagcacgccttctttcacaaagcgcttccaggttttaaaatcattccgaatgacattcattgtattcgctcccccctgttcagaccatcttttcatatattgtaggggaaaagtaaagcgctttcaacgaaaaataccccttctcatctgagaaagggtattccggttatacggaatgcaccgcaagtccggtgacattcagcagggcttcctgaagcgtttctgacagagtcggatgcgccgcgataaagtgctccgacatatccgccgtcatttcaccgttcatcatcatgaccgcctgaccgatcaattccgtcacgtccggtccgatcattgacaccccgacgatttctccgaattccggctcggcaatgattttcattttgccgccgtgctgatgcttaattaacgcttttccgttagcagaaaatgagcattctccgattttcacatctccgtatgtctctctcgcctgtgtttccgtcagcccgacagctgccatttccggcgatgtataaatacagcggggcaccgcccgcatattgactttgctatcctttcccgaggcatgcgcggcggctgtgattccttcatgaatggcggcatgcgcgagctgcattcctccggccgcgtcgccgcacgcatatatatgaggcacattggtctgcatatggtcattgacttcaatcccgcgcggagaataccggatgccggcttgatccaaattcagcccttgcaaacgcggttttctgccgattgcaaccaaaatgtgatcagcctgagcttcaatttcttttccgtcttttgtccacacggcggttttcctttctttgtcaatccgctgaagggcggcttttgtctgaatatcagccccgctgtctcttaaagagtcttcgaaaacggcggcgatttccctgtcttctgccgggagcagccggtcagccgattcaatcaccgtcactttcgttttaaaccggctgaataaagaggcaaattcgcagccgatcacacctcccccgacaatgagcagagacgaagggattttctgtaaagaaagcgcatctttgctgtcgattacccaatcgccgtcaaatggggcaaacggcagctccgccggttcagatccggatgcaatcaatatccggtccgcttccagaatgtcttttgcgcctccttcttcttcaacaagcaatgtctgctctgtgagaaatgaggctgtcccgctgatgactttaatctgatttgctttcattaagtattgaattccctgcacgagctggctgacgatttgccgtttgcgcccctgcatgcggttccaattgagtgtaatgttttgcggcagttcgatgccgaatgtatttgcatgcctgattttatcgagcacattcgcactttccaaaagcgactttgtcgggatgcacccctcattgagacaagtgcctccgagcggccctttgtcgatcagaacgacttctgctcctctccgcgcggcagtcacggcagctgcatatccggccggcccgccgccgataatggctagtttcattttttcacctctctctataaaatcaaaccggcaggctcttcaagcagcgctttgaccgttttcaggaagtccgcagccggggcgccgtcacatactctgtgatcaaaggtaagactcagcggcagcatgatgcttttgacaagctcatctcctttaaacgccggcgtttcatagcttgcgcccactccgagaataccggcttcaggcggattaagaatcggggtgaaatgctcaattccgtaacccccgagatttgtaatagaaaatgtcgaaccgtggagatcatctccggaagcattgccttcccgcgcccggcgtgccgatgtgctgatgtgatccgcaagctcaaggaatgaaagcttttccgcatcccggatcaccggcacgacgagaccgttttcaagagaaaccgccatcccgaggtggacatatggataggtgatgatccgctcctcttgataagagctgttcagctcaggatgctgtttcagcgcaagcaccgcggcccgggatatgaaatgtgtgaccgtcagtttaacaccgctccgctttttcgcgctgtcggcgagctgctgctgccattttacaagctccgtaatgtccgctttcatcgtcagcgtcagctgggcgctgttttgcaggcttttgtgcattcggtctgcaatcacttttctcatcgctgaagccggttttccctccggctgtgctgtctgaaccgaagactgcggttcagcttctgtcttcatcgccttgatgacgtcagcttttacgattctgcctccgggccccgtcccgttcagcgtatcgactttcaacccggctttctccgccatttttctggcaacgggagatattttcacgcggtgtttgcgcttttgcccggcttttggagcgggaatatgttcaggttcagcttgcggtttccctgctttttcaggagccggcgcctccttctcccgcacttcttcgccgttttccccgatataacagatgggcgttcccggcgggactccttctccctctttgactttaatgtgaagaagcgtgccgctttcaggcgcttctatttccatttctattttttccgagttgatgctggcgatgctttctcccttttctaccgggtcgccgacttttttattccagacggatacttcacctttcttcatcgccattcccagcttcggcattactacttttacagccattctgtatccctcctttaattcattgccggctcgccaagcaattcaagcgtgacgctgacaatttggtctggtgtcggcaaatattgatcttcaagcaccggcgaaaacggcaccggtgtatgcggcgctgtaatccgcttaatcggtgcatcaagcaaatcaaagcccttatcggcgacaatcgcagcaatatccgtggcgatgctgcagcgcggattggcttcgtcaatgatgatcagccggtttgttttttctaacgatgtgaaaatcgcttcctcatctagaggagacagactccgggggtcaagcacctcggcgtcgatgcctttctcagaaagctgtgcagccgcttcaagcgcggtattaacctgcttgccgaccgcaaacagcgtgatgtcgctgccttcgcgtttgatatccgcttttccgagcggaattgtataataatcttccggcacctcgcccttcatgctgtaggacgttttgtcttcaaaaaagaataccggatcattgtcttctattgccgccagcagcaaacctttggcgtcatacggattggacggcacaaccgtcttcagccccgggatgctggtgaacaggccatacagcgcctgcgaatgctgagcggctgcccggaacccggctccgtatgtggtgcggacggtgatcggcacttgcgctttaccgccgaacatatagcggaatttcgccccttggttaatcacttggtcaaagcacgttccgataaaatcattaaacatcagctcggcaatcggtctcagccccgtggatgccgcagccatggccgcacccatatagcccgcctcagaaatcggtgtatccagcactcggctgcgcccgaattcctgtacgagaccctttgtgaccccgagtaccccgccccatgcctcatcatcttgcaaatgatcgaccgccgctcccccggcgacatcctcaccgattacaagcacattgtcgtctcttctcatcgcaagcttcattgcttcattgatcgcgtccgacatgcttatgactctcgccatctcacattccccctttttcatatgacacgtagacgtctgtcaacagctcagactctttcggataaggactcttttcgctgaacgagacggctttttcaatcgattcgctgactcgctgttcaatgtctgacaatttatttgcatctgtttcttttagaagatagtttttaaagccttggatagcatccttttcttcaagatgctcagtcttttcatcctttgttttataagtttgggcatcgccttcgaaatggccgtagtttctgtaagtcatacattcaatcaaagacgggcctccgccgtttcttgctctttctatcgcttccccggctgcctgataaaccgctaaaatatcttttccgtccaccgtgacccccggcatgttgtaggcagccgcccgatcggcgattgaatcacaggctgacgcgtactcaaatgtcgtggcttcgccgtagccgttgttttcggcgatgaacacgacaggaaggttccatactgccgctaagttcagcccttcatggaaggtgccttggttattggctccgtccccgaaaaagcaaacgcttacatttttagtttgtttatatttagccgtgagcgctgatccgcatgcgagcgtaaatccgcccccgacgattccatttgcgcctaacatgcctttatcaagatccgcaatgtgcatagaaccgcctttgcctttacacagtccggtcgcttttccgaatatttccgccatcatgccgtccagatcacagcctttggcgatacaatggccatgtcccctgtgtgtgcttgtaatgctgtcgccatcatctaaatgagcgcacacccccgcagctaccgcttcttcaccggcatacaaatggacgaatccgggaagcactccttgcgcgaaaagttcatgcactttgtcttcaaagcccctgatttccagcatcttttggtacatccacagcgctttttcctcagttaatgacaagccttctcgttttaacaattccattttgtgcgcctccttctatttagggttcacacttataaatgcaagaagcatgccagcctttgaagcccgtaaaatgaatgtttttattttttcaatggagacagtttgagacaggtgtctcattttgtctcgatccgttccctttgtctcgttttatggcatacaaaaaagaccgggcatcaccctgtctttgacaatgatcgacgtatttatttcctcggaaatcttttattgcttcattcttccgcatacagtctatcacggcgtttgagtggttacactctttttttcatatccacgcgctgcagttcatccttttcttcaacagcccgattcagtgcttgaagcatgtaaccaatgcctttatacgatgacagaggccaggtgatatgctgatgctctccgatgacggcgtttagaatgcttcggtattttttcccgccaagcatgacaagctcttcgacgtcggaaaagcctttttcataaaattgacggcgcagctcgtccgctgccatgatctccgggtgaccggttccaaaagtgacatcgtaatttccgggaacagtatcatccggacgaagaaatccgtgcttcgccgacaaaatcacccactcatcgaaaaatgctttcgcatatcgctcgcatgcctgatgaaacgggctgagataagcgtcttccgcccttaccggccctgtatctgaatggacatcccaaatttttttcttgccgcaggggatgatgcacagtcgtttcatttttctctcccctttatgatgtatctcctatcaatgtaccattattcgtttatttctgcatgacgaaaccggccatggatctgtctgggtaaaagctgcacacaaaaaggcccggaattcaaaccgaaatccgggccggatgatgagttgtttatgtcactcttgctccatcccatcaagatactttctctcaaagtcatcgagcaatgcacgcacttcatctgttgactttgtattcatgcattgatttcttaattcacttgctccccggaacccgcggagatatatcttgaaaaagcgggggagcggtttatatgctctggcttctgcttttgaatattcatcatgaagatccagatgcaatctcaaaagatcaagcaattccttactgctatgctctctcggctccttttcaaaggcgaacggattagtaaaaatgcctcgtccaatcataatcccgtcaacaccgtattgttcagcaagtttcaagccggtttcacggtcaggaatatccccattgatcgtcaaaagggtatccggcgcaatctcgtcacgaagtttcttgatttccgggatcaactcccaatgcgcatctactttactcatttccgctcttgtacgcagatgaatggaaagattcgcaatgtcttgtttcagtatgtgtgtcagccagccgcgccattcgtcaacatccgtgtagccaagtctcgtcttcacacttaccggcagacctcctgctttcgccgcctgtattaattcggctgcaacttcaggacggcaaatcaggccgcttccctttccattccccgccacattaggtacaggacagcccatattgatatccaggcccttaaaccctaattccgccattccaatactcatttggcgaaagttttcaggcttatctccccatatgtgggcaaccatcggctgttcatcctccgtgaaagtcaaacggccgcgcacactatccttcccatccgggtgacaatagctttctgagtttgtaaactctgtgaaaaacacatcaggtctgcctgcttcactcacaacatggcgaaaaacgacatccgtcacatcttccattggtgccagtacaaaaaatggccgcggtaattcacgccagaaattatctgtcataacaaatccaaatcctttcatgatgggatacagtgaaacctttatcccaaaattaaaaactgaccatgcttcttttacacttatagcatgtgtcagcacttcttatcaaacgatagtaaattttgaacatttcactttttacacgttaaaagtaaaaaagcaaactggagtagaacacattaattgagctaacgtaatagactaccgctatagtcaaccccatatcgtttatttctgatcaactcagtcaactccttcacctttaaaagggtttgagagagaaaaagtgtgatgattatctacacctaatttttatttatattgtggtttattaagattagcgctgaccttcatctttcttagcggccttacttttgctctttttggataaaaaggattccaacctaaatagaatatcatatgagttctccctattaccataaaacaaatttcaagaaataagttgattaagcaaatggggctggggggtatatctgagtactgaaaagaatgtaaaaagaaaaagccttaacttgccgcttgtgaatcacatggagtaaagaggatggcatgggaaaataaactcgaacttaacagaattcaagaacttcaatctggatcttttcggatttactcatggtctagaaataatcaacgccgcaagtggcttggctctatacagtatatgtactaagggttgatcggcttttaaaccccgtatgttaatatctttatacaatcacctatatatatttgtataaggttacgcttcggtaatcctgatccaaaaccaataaaatagactgctgactaagtgccgcagtcttcattcataagattaattagaaagtgttcatgttctttcatcattaaataaggcatcagaagttattgctttcatttcggatattctttgttatacctttaatgatttgtataacagtgaaaacccccaagaaaacagtgacaatattaaaccatggattatcatagaatgaaagatatgtttgaaagaaatccagttcagctatatttgctgggaatccattcatttctctataattaggaccccatcccgttaattctacaaagttaaaataaagctgtgatactaaaaatgccaacaacgtgtgaaaccaacttcttttatatactttacccatttctttatccatttccttttctgcaatactttttagcctagtgtcaatctaacatcattatatgatgaagcatgattgtcgcaataattacttattaaggatataaccatcgcaggtattactgtaatagttgttatcacttgcgtttccgccttatatttattcctttttttagaacaagaggaatagttggggtccttttcctgtttaggctttcatattatatataacgaccaaacatgcttttttagtgtatttgatcttttatcgacagttgttgatatgccaactgccgctgtgatttagtgaaagttagcacccttgccttttacagcttctacttcagaaccttcgttcagttgttgaaatctcaatatctctcgttcggtttcacctcctttttatcatttattaaagacctacttactttggcatgataaatactttacagttgaataatgttacaacttcatctcaaaccaatgatatcaaattattttacattatcccattaatgtcacaataaaccacagcgtcattatacaaacgaggtcaaaattggctgttttctcctcgcttttccacacgttttttcaactcttttcatcagtttaaattaaagatctccgagaaaagaaggaagataaacagccagggcaaaggctgcgcataaaaaaaaccggaaatcggaaatgtttataccgaaatccaggtctgattacgaattgtttattttagttagacgatttcaacacaagcttcgccacagcttccacatgggccgtctgcggaaacatatcaacaggctgaatatattcgacgcgatagtctttcgacagcgcctgcaagtctttcgccagtgtggaaggattgcaggatacgtagacgaagcgtttcggttttacttttttgatggtatctaaaaatgttctgtcacagcccgttcgcggcgggtcgacgatgaccacgtcgggacggaagccttctttcgtccatttcgggagccagtgttcggctgttcccgtgacatatgccgcgtttttgatgccgtgttttttggcgtttttcttcgcatcatcaattgattctttaatgacgtccatgccgcggatctcttttgcgccgcttgaaacccacatgccgatcgtaccgacgccgcaatacgcgtctacgactttttcttttcctgtcagctgagccgcttgtttcacttcgtcatatagcttgaccgtctgctcagggttgagctggaagaaggcgcgggcgctcagttcaaatgacacgtcaccgagcacttcttgaatggcatgtcttcctgccagcgcttttgttttgtcaccgaaaatgacggatgtgcgcgcgccattgacgttttgaataatcgatttcacttccggcagccggttctgaatggctttgacgatctcgtctttattcggcagtgtctctttcgcggtgacaagcacgacctgcacttcgcctgtttcaaaaccgactctcgtcacgatggtgcggacatcgccttttttggtccgttcgttataaacggatacgttgtgtttttccaaaatacggcggacgatacccgttgttttgtttgtcgccggatgctggacaatgcattccttaatcgggacgattttatgggaatcaagtccgtataagccggcaatgatgctgccgctttgcgagcgtccgacttggaactggcttttgttccggtaattccaagggttgtccattccgatcgtatctttaatgttcatttcttcgacattgaatctcgtatgacgttccagagactgaatgacgatgtcgcgtttttcgcgaagctgctgggtgtatgccagatgctgaagctgacagccgccgcactggtcgtagaccgggcatggcggcgtgacgcggtgttcagacggcttgcggatgtttttgacgcgtgcttctgaaaatttcggctgcacatttgtcgcttcggcaacgacttcttccccgggcagagcgccgggaacgaagacaacttttttcttaaaatagccgacgccctctccgttaatgccgagacgtttgatggtcagcggaaatgtctgcccgattttcaattcggcaggcgcctttttttgatgttgattcacgtttttttctctccgtttctatataaagcctttctcctgggaaagcggctgatttgaaatatcacatcttttcagtataacatgcagccggcggttccttcatgtttttcactggaagtttccaaaaaatgatcaaagcggtttttcattcaatacttctccacaaatataaggacgcatagcttaaatacggcgcccattcgctgcttacctgaagcatcacgtctttcgacggtttatcctcaagggcgaagcggcgtttgatggcattttgcaggccgatatccgccaaaggaaacagattcgggcggccaaggccgaacatgaggacgttttggacggtccacgggccgatgcctctgatggtgatcagctttttcataatgtcttcatccgataaatgggtaagttccgccagattgagcgctccgtctgcaatcatgcgtgaaatgtcaatcgcatattccgcttttctcatgctgaactggagctcccgcaagtcctgataatcaagcgccgcgatcgttttcggctcgggatagcaccagacgccgtctttttgttcaccgaaggcatggacgaaccgttccgttaaggtaaatgcgaaagacaggttgagctgctggtggatgatgcatttcatgagacagttgtagacgtcatattccaagacgagcggggttcccgcatgctcctcaaaaagcgccgacagatttgtttttgagaaatgatcaagcacaggctgaagcggctgttcccattgaaaaatgtgtttgatccgttcaatcatctcctcgcggtccgtttctccgctgacgaggaagaccgggtctgcggcggtgccttccgcttgaaccgtagtgacggacagtttgccgtcccgtgttctgagcggcactttgattgatcttgcatgaagatcgaccgcattcagcggatcgagcgacagcctctcaaggactttatcaaaatgatacggcggcgtgaccgaaaccgtttccttccacatatgctccacccctttttgtccaagtatatcatgaagcgggcgggcggcaattcgtatacttttcttcataacgccgcatgatataatggcaggcggagggttgtttatgatacatataaccgcaatcacaacacataatgagatattagataatatccccctatcacgtacagaacaaccggacatcgcatggtactggatcgattttttcggcgctgagatgcatgaaaccgagctgctgcgggattattttcactttcatccgcttgcgatcgaggattgctttcagcatatgcagcggccgaaaatcgaccattatgacggctaccgtttttatgtgctccacgccttgaacccggacacactggaaatggaagaggtggacatctttcagtccgaccgtttcatcgtcagcttccatttgcacgaatcgcccggcgtctcaagggtgagagaacggtttttcgcttctccgggattagccaaaaaagggccggggcacatcacttatatgattatggatcagcttgtcgatgaatatttccccgtgctgtacaaaattgaagaccggctgaatgaaattgaagacagcagaacacataaatcttacggcactttaatgaatgaagtgtttgaattgcggactgatcttttgaacctgagacggacgatcattccgatgcgcgatttaatgtaccggattttgagccttgaccatgtaaaagaaagccgtgaaacgaaggcgtatttcagcgatatttatgaccatctgttaaaactggccgagctgatcgagtcaaaccgtgatatgacgtcagatttgcgggacagctatgtgacgctgaattcaaaccggatgaacgccattatgatgacattaaccatcgtctcgaccatttttatcccgctgacgttcatcgcgggggtttacggcatgaatttcgataacatgcctgagcttcattggaaatacgggtattttatcgttttgggcgtcatggccgttcttgtcgccgccatgctgttttggttcgcccgcaaaggctggtttaatattttcaagtaagaacggctgccggctgttcttttttttgagaaaacatgatagtctggaaaaaaacgtaaagaggtgtgcgccgttaccatcctttctcataaaatcatttcttctgtcctcctgcttttcagtgtcatgtccattgccccgctgtataacggccgtacggtgtctgattacatctttgagtcgctcggcttttcttcctggtctgaagacggagcccatatctccgtcattcccggggtcgtcctttactttgcggcgttaatctggtgtgccgccgcgttcaggcggacgcttccctcggcggggctgtttctgatctttctcagtatgggggccgcttccggtatcagtcctgccaccgaatatgccgctttttccttaaaacagttcgcgcccgaaaaagagtctgtcgaatatttgaagcaccgcagcgaatgcagtcatctgattgaacgaaaaagagcgggcatgagctgcacgctttatatcaatcattacggaaaaggggaacaaaccatttctgtcacgccggatttatcagaaaacataaaggacgtcacattcaaatcaaaaacattcactgtaaaaccccgttcaaaaacaatcatcaaaacccgatttaccggattttataaggggacagccgcctcagactccggatggtcttcagaaccggaactgaaagtggcaatcctgtacacagcagaataaccattttgcatgtataatggtggaaaacttttcattggagggactgtcaaatgaagatcgccatcgtcggactcggcaatatgggccgccccatcgccgaaaatatcatgaaagccggatacagcctgactgtatataaccggacgaaagaaaaagcggctgacctgctggataaaggggccgaatatgccgaaacgccccgccaggcagctgaacatgcggacattgtgctttcaatgctgtcagacgatgaagctgtaacaggcgtgacgttcggagcttgcggcattattgccgggttatctgaaaacggcattcatatttcaatgagcacgatcagtacggcgctgtcagaacagctttccgccgcacattcgggcagagggcagtcctttattgccgctcccgtcctcggccgccccgatgccgccgagaaggccgagcttcgcatcatcacagccggaccggcagaagcgaagaaaaaggccgaaccgctgtttaacatcctgagtcagcaagtatttgacacgggtgaagaaacaaaaacggcaaatgccgcgaaaatcagcatcaatttcttgctcgtttctatgctggaggcgttatctgaatcattcttaatgatggataagttcggtttagaacaaaaacaatttctagaaatcgccaacgcactctttggctctcccgtctatcaaaattacggcacgatcatggctgaggagaaatttgagccggccggcttcaaaatgtctttagggctcaaggataccaatctggcgctcgccgccgcagaacaggtttccgcaaaactccctcttgccgaactggcgaagagccattttgaaagcgggatcgcacaaggctgcggagatttggattgggcggcattgattaaatgtatcaaataacaaaacacctctccattaccaggagaggtgttttctacaggcgcggcagcttcatttctttctcaaacatcaggtcatcaatgcttttaaacgtgtagccttcttttttcaaatcggtaatggcatcgtccagagcttctgaattgtcctttgaaacggtgtgaagaaggtagatcgcgccgggatgcgcctgctttatcatgtgatcataggcgtattgttttcctttttgctcgttaaccttccagtcgacaaatgcgacggaccagaaaaccgtttggtagccgagacgcttcgtttctttgaggacatattcgctgaatacgccgcgcggcggacggagatacaggttgtcccgctttccggtaatgttgtacacagcttccgtgacggaatcgagttcgtcttgaatctgatcgcccgtttttgtcgtcagatcaggatgatgaaaagaatgattgccgatgatatggccttcctttgacatccgtttaatcaaatcaggctgctctttcacaaaatgacccgtgacaaaaaaagtgcccgtgacgtgatgtttttttaacacatcaagcactttcggggtgtacccattttcatatccgttatcaaacgttaaatagatggtcttttctttcgtattgcccaaataaaaggcatcatattttttgaccagattgtccagctgtctgccggcatccggcggctgatgattgacgctgcgtttaaatccccagtttatccgttcattcggcaccgcttctgcgctgttgatgcctcctgcaagtaaaacggccatgcagcaaattgaacaaaaccatttcatgaccagcactccttctgcatttttccttattttgcagtaggccctgcccttttatacagccgcattatggaaaaagaaaaaccccggcatccgccgggggttattcccaatcctttttaaagcgttcgtattttgcttccagatcatcaagcatgccgatgagccggtctatatcttcaacgtccgttgattcagggtctaatgaatcaatgacattcataaacatatcgagtctgttcttcaggtaatcgagctgctgatctttgctgtttactgcattccccatacttccactccattcattttttataatggtagcgtattttttggcgtttttcaatggttccgctacttgcgatcttggcagatcaggtctaaaattaacagttggcagacgttagtatgcccatttataaaggagttagatagtcatgacacaaaacacagcactgcgtccgattacaccggagtacgatccttgggaagcgtacatggatgtcgaccagtatggagatatgaaactgacgaacgttgaattcacaacgacgactttgtgcaatatgagatgcgagcactgcgccgtcgggtacacgctccagccgaaagacccggatgcgctgccgatcgaccttttattaaagcggcttgatgaaattcctctgttgcgctctatcagcattacgggcggcgaaccgatgctttcgctgaaatcggtaaaggaatacgtcgtcccgcttttgaaatatgcgcatgaacgcggcgtgcgcacacagatcaattcaaacctgacgcttgatatcgggcgctacgaacggattattccttatttggacgttcttcacatttcccacaattggggaacggtcgaggactttgccgacatcggatttgcgatgatggagaagaaaccgacatttgaacagcgggcgcgctattttgataaaatgattgaaaacagccgcacgctggtcgaagcaggcgtaatggtttcagcggaaacgatgctgaacaagcggacgctgccgcatattgaacatattcaccggcagattacggaagaaatgaaatgccagcggcacgaagtccatccgatgtatccgagtgatttcgccagcgcgcttgaatcactcagcctgaaggacatgagacaggccattcatcatctgctcgacattcgcgatgaagagacatggatgctgttcggcacgctcccgttttacgcatgcagccctgatgaagaagaccagaagctcctccgccgcctgcgggaagcgaaaaacgttacggtgcgaaacgaccctgacggccgctcccgcctgaatgtcaacatttttgacggaaatatcattgtcacggatttcggcgatacaccgccgctcggcaatattaaaacagacagccttcccgatgcatatgacaagtggagacagacgaagctgagcaaagagctgaactgccgctgcacaaacgtccggtgcctcggaccgaacgtccttgtcaaaaacagttattatcaggacacggatttttcattacgaaaagccagaggttaacagaagatggaaacgacaattacggatattttgaaaagcaaagtggttgagatcatcatcgtcgctctcgtgctttacgccggtgtttttctgatcaaccgctttgtccaggtgttatttaaacgcatagatttcttggaggaacggaaagggaaaacgattgaaagcctcgtccgatccatcacccagtatacggcgacgatcggttttatcttttacgtcatttcgttattcgttcatgatttcggccgaattttagccggggcgggtgttgccggtatcgtcatcggtttcggcgcccagtcgttaatcaaggacatattggccggtgtctttttgatatacgaacgccagcttcataaaggcgattacgtgacgattaacaatctgttcaacggcacagtcgaagaaatcgggctccgttccctccagatccgtgagtggaccggcaagctgcttaccatttcaaacggtgaggtcagacagcttcaaaactataatattgattttatgcggattaccgagtccgtcgtgatcagttataaagaagatcccgagcgggtatatgccgtcttagaaaaagcctgcgacatgctcaatgatgagcttcgcgattcactgaagcgggatgaatttctcaatgcgacggagccgtttcaagtgcatggaatcatgagcctgaacaaattgacgagaggcatagaatttaccgtcaaaggcatggttcaagataaagaatacttctcggcaagccttgcggtgagacgcgttcttgcccgggagctgtacaacaacaatgtgcaattgcttgaggaaatgtatcacacacaaaaaagctgattcccgaaccggaatcagctttttttatttatctcggctgcgctgtcatttgaaaaccgaatgtgacgtgatcctgcaccggaatccaagccccgattccttgcgaagtcacatttttgacgacaagtttccgcttgctgcctttcagcaccaaatacacttcaccgtatgttacttttcctttttcattaacggccggagcgtaggcgtgcaggtagccgagccgctgcggagaaattttgtaggtttgatcgcgttttgtgcctgcgccgataaccgtttcaaacgcgagcggcagttttgttttcttcatcgctttttgcatcatcatgctttttacgtcttctgcgttcggcaccttcgctgtgagcccgcctttaattttgtactgctgttcttgggcgtatgagataaccgcggtttgctgtccgccccggttatccgctctgttcgtattgatttttttatattcccagttggcgaccgtttcgttcgattgatagccgagcgcccatttcccgagaaatattgtcgcccggtagccgatggcaagcggtgaaccggaaaccgaggattcattcagcatttttatcagatgcggattttcgatgttgatctcggatgtatctaacaattcctttgccagtttgctcggctgaagcatcggctggtcctgtgaagcattcggatacgtattttcctttgaaatgcttacaacagagttgggaaccttaaacggtttctttgcaccggcagacggcattgcgaaaaaactaaaggataacagcagaatcagtgtggcatgaaacagctttctcatcatatcactctttctatagcattttcctttagtcttttcctccgcaatcgttgttatccgcattttttacaggttaaagcaggaaaaaaccgatcgccatgatgacataagcggcaaggagcgtagccccttcaaaccagttcgaatcgccgtcatttgaaatcatcgtcatcaaaaggacggatgatatcatcgccacaagctcgggcaatgtgaatacaagcggcatattgaccggaaaaaagatagaacagatcacaagaaccggggctacaaacatggcgatctgcaaagtcgaacctaccgcgatttcaacggcgacatccatcttgtctttgtacgccataataatcgccgacgcatgctctgcggcatttccgacaattgcgacgataatcaccccgataaacagctcgctccagccgaactgttcagccaccgcatgaaacgtatggacaaggttttcagatatgtaggcgacaataatagttgaaataaataagacggctgtcgctcttttccccgaccactctggctgctcctcttcttcctttgcctccggctgattcggctgataaacaccgcggtgagtgacgagcttgaaataaagagctgccacgtacaaaaggatcatgatgatgctgatgccgacactcaaatcaagcttgtttttttcccccatatctatggaaaacacttcgggaatgacaaaagctacgataatggcaaaaatcagcaggcctgaattatgccgggcatcatgaatattgaattcctgccgcttgtatttcaaaccgccgataaaaaatgacaatcccgcgacgagcaaaagattgccgagcaccgaaccggtcagtgaagcaagcacgatgcccgtcagcccttcttttaaggcgaaaatcgatataatcagctctaccgcattgccgaacgtggcattcagcagaccgccgatccgcggtcccgcgataatggcaagagattcagtcgctctccccatataacttgcaagcgcaataatcgtcaagcaataaataataaacaaaaccgctgacggccagtgcatcaggccgccgatgactgaaagcggcactcccgccgcagccgtaaagaaaaaaatccgattcatatctgcctggctccttttttcgaataagtctttttatatccttctcaaaaactccttcaattacacttcctcggcagcccgaattggcattttcaggttgccggacgcggcaaatccgtgtacgatcaagaaagatactgaagaaggagaaatacgcgatgtcacgactgtacttctttattttggttctgcttgtttccatctccggattttcccaaggcatgcttctgccggtgatctccgtcatttttgaaacgaacggagaatccgcagccataaacggacttcacgcaaccggcctttatatcggcgtgcttctggcgtcgccgtttatggaggccccgctgcgcaagctcggattcaaacctctgatggtcatgggcggatttcttgttatcatcagcttattcagttttatttggcttcaatccatatggttatggttttttcttcggctgcttatcggaatcggggatcatatgctgcatttttcaacccaaacgtgggtgacttccaagtcaacgccccgaaacagaggaagaaacatttcgctgtacggactgtccttcgggcttggattcgctgtcggcccgttcatggtccctcttgtgaaaacaagtccgtcccttccgtttatcgtatccggctgtatcagtctttgtgcctggctgtttgtgtttgccttacgtaacgagtacccggcgcaaggtccggatgaaacatccggggacaacagcgcaaaacggttttaccgcgcccttcttttcggctgggtcgcttttctcccggctttcgggtacggttttttagaaacggcgctgaacggaagctttcccgtgtacgcccttcgtttaggcatatccgtggatgccgtcgcgctgatattgcccgcttttgccatcggaagtattgtattccagttccctctcggtttattaagcgatcgattcgggagaaaacgtgtcctgctcgtcatcttattaacgggtgccctttgctttttgacggccggactgtttccgtcgccttctgtcatcggctgctgctttttcacggcggggatggcggtcggcagtatgttttccctcggcatcagctatatgagcgacctgctgccgtcccatctgctgccggcgggcaacctgctctgcggcatttccttcagcctcggaagcatgatcggcccggtggcgggcggctggtatatgcagcggtttgaaagcgccaacttgttttactttattacggtgattctggtctgtatttggcttgcgctcgtcttcgggaaaacaaagcacagccccgcttccgaatcccattcttttccggccacataaaaaagccgcctgatctgagccaggcggcttctttctagtggtatccgttctgcccgttggcgcttccgcttgttttattcttcgggccgttttttgagttttgtttattatggcttccgccttttttcgtatgcttggtcatagccgattccctccgtttttcagcttgaacgtcatccgttcctctatagcttgctcccgcggtacggattttcatcaggaagctttttacgtttatgtaaaagcgcgttgatttctcctcctaaaatcaacaaggttcccgtaaggtaaaaccagatcatcaggacgataattcccccgatgctcccgtatgtggcgctgtagttggcaaaggtgccgacgtaaaatgagaacagcatactgacgataatccagccggctgccgcgaatacagctcccggcaggacaaaacggagggaaagctttttattcggcgcgaatatgtaaagcgcggtaaacacgattaaaaggataagcggactgataccccagcggacaaccgaccacacctgcaaaaacaggtccgaggcgccgatgaaatccgcggccagcattccgatttctctgccgaacaccggcagaagcagtgcgattaaaatcgtaaccaccatcgcaatggttaaaaaaattgaggtcaggcgaatgatgataaatgagcggttttcctcgacttcgtaggcatggttaaatgctctgacaatcgcgttcataccattcgaagccgaccagatgacggcgataatcccgaatgacaaaagcccgccgctgcgcttgttcagcgtttgctccgttatggatttcaccatggacatggcgctgtcgggcgcgtattgatcgaccgccccgagcacgtcttctgccgatatgggaagataggcggtgagcgtcagcatgaaaatcattaacggaaacaatgacagcaggaaaaaatacgccagctccgccgatttactttgtccttcatgcagagaaaaccttgcaaacagctcctttataaaactcatgacatcccacctcaatgatcgtttttcgaaaaatgctccttcgtttcttttaacaggtcaatgacctgcggtgtcgtctgcttcagcttggtgatctgcccgtttaaaaaactcagatcttccgatacggtattggcgaagattttcacttgatccatttttgcggaagcctgctgcttcagggcttcaggatgttttcggtaaaatgccgcacgccgcctgcacgcgtccatgttccggaaacatgcctctctcgtcggcttatgtaataaggacagtgctccgccggcggcagcgccgatcagaatggcttttgccatgatgcgtgtctgcttcatcggtcaatcccccttataaatgatggtctttctttattgtctccagcaaatgacggcacccggactcgaccaaagcgtacacctcgctgaaatttccggtataatacggatcgggcacgtcggcaaggtctgactccggtacataatcaagcagccttgcaatacgcggcgccgcttttttataaccggccatgctgcgcagatgtccgatattttctgcatccatcgcaatgacgtaatcaaaatcggtcagatcagactcacccgacctgcctcgccgtgatgccgcttgcgctgatccctttctccttcaggatctcctttgtcccttcatgcggcggatttcccgcatgccaggcgccgattcccgctgaatcaatgttaatctgcccgttcagcccgtttttcttcaccatatcagaaaataccgcctctgccataggcgaccggcaaatatttcccagacagacaaacagcacatgtatcatatcgataacctccctattctttccccgcattttgaggatcaaaaaccttatcaacatcttagcaatttttctgcggctgtggaaataagcttttattctaaatgaattctgttagaataaaggggacgaaaacgatcatgaaaggatgcatgaatttgccgagccaacaaacagaaacgttaaataaaatgattgaagacatttcgcaaaagctcaacatgctcaatgtcggcgtcatcagagcggaagatttcagtgatgaaaaaatagaagatcttacataccttcatcaaatggtcatgaaaaaagcatcattcagcccgagtgaaatgcaggccattgccgaggagctcgcctctctcaggaaataaacccatgtcagacctgccgaaaaacggcgggtcttttttgatttaaaaaagtaaaaaataaaagttcatcggtttgacacatataaaaagaaggagtatagtaactgtgaacttggtagaacgatatactaaatgagcgggccgcttatctttttttgtttagtagaacgatatactcattgtgatatcagcgttattcaagtttgtctatgcaaccgttgtatcaaacagttttcaaagaaaggcagtggttcaataaaggggtatggtgctgtgcttttatcaattaaaaaaataatttaattctttattaaccgcattaggggatgtcatcatgaaaaacatatacaccaaaatggcagcgggtctttatattaactatttcctgctgggcatgatcaatattattatcgcatccaatatggaggcattatcaaaacagcttcatacttccgcagccggtgtcagctatttggtctccgccatcgggatcgggaagctgatttcgcttctgtttgccgggaagctttcggatacattcgggagacggccgtttatcgtgtcgggcgcctttctgtatctgattttcctaatcgggattccgctttcgacaaactatacggccgcgtttatcttcgccattttcgccgggatcgccaattcctttttggattccgggacatatccggcgcttattgaaggatttccgaaaaacgcaagctctgcaaccgtgttaatcaaagcgtttgtatcaatcggcgcgacggtgcttccgttttttatcgcgtttattgcggacaggcatttgttttacggctggacgtttttcgtaccgggcattattttcttcctgaacggcttttttctgttgaaagttccgtttccgaatcataagcaaaaagaagacggcggccggacggaagcctctccgtctgatgacgcgttcacatcacagccgtcgatatggcgcgaaggcgttgcgatcattctgttaggcttttcatcaacggcgctgtttatgctcgttcaagtatggcttcctaagttcgggcaatccgttttgggcatgcctgaggtgcaggccgtcaaattgttgagctattacagcatcggggcgcttgtgtccgtgttattgctggctgtgctgttaaacagagtgattcagccgattacggtaatggtgctgtaccctgtgatcgcggcaatcgcgctgcttgctctgattttcattcagcagccggccgtatcggtcatcagctcctttgtcatcggactttcaactgcgggcattctgcaattggcgatgacggttatggctgttttattccctaaaaataaaggtacaatcacatcttttgttaatatagcatcaagcttatcttttattgtcattccgcttgtaacgggagcgatatccaaagccgccggcctgacgcctgtttttctgcttgatatcggaattgcggccgtcagcgccctcctcgcattgtttatcggaatccgctttaagcaagtgatgaaagcctgactattttttaagggagaggatttatcatgcaatctatcacaatcagaaacacggtcatcggtgaagggcttccgaagatcattgtgccgctgatggcggccggagagaaagaactgctcgaagaaattgaagccgtcaacaggcttcgcccggatatcattgagtggcgggcggatgtatacgagcatgttgacagcctggacgccgtaaaaggcatgcttgaaaagctgcggaaagccgcaggagcaacaccgctgcttttcacattcagaacccataaagaaggcggaaataaagttattgatgaccgcttttacattgaattgcttaaaaccgccatcgaaacaaaacatattgaccttgcagacgttgagctgtttacgggagaagcggaagtcaaatcaattgtgaaaaccgctgaagacaacggcgtatatgtcgtcatgtccaatcatgattttcatcagacaccgaaaaaagaagaaatcatttcccggctccggaacatgcaggcgtacggcgcgcacattccgaaaatcgcggtgatgccgcaaagcactgaagatgttttcgtcttattggatgccactcacacgatgaaaacacaatacgcagaccggccgatcatcacgatgtcaatggcgggaacaggcctgatcagccggctggccggcgaagtcttcggctcagcgtgcacgttcggagcgggcaaagaagcatcagcgcccgggcagattcccgttgaggaattgcgcagcgtactcagcattttaaataaacatatgtaatcagcgttttttgccctcaaagcgggaggaaaaacaaatgaatggactaacggaggaatacatcatgaagaaagaattaggacggattaacggaaaaactcagcttatcggattattcgcgacaccgatcggacactctttatctccggcgatgcacaacctggcgtttaaaaaattaggattgaactacgcttacctcgcgtttgaagtcggcaatgaacagctggaagatgtggtaacgggaatgcgcgccttaaacgtcagaggcttcaatgtctcgatgccgaacaagatgaacattctcccttatctcgatgaactcgcggattcagcgaaatttaccggcgcggtaaatacagtcgttaatgaaaacggcagactgatcggacactccactgacggtatgggatacgtccgcaacttaaaagaacacggcatcgatatcacagggaaaaaaatgacgctggtcggttccggcggggccgccactccgatagcgattcaatccgcattggaaggcctcggagaaatctctattttcgcccgcaatgacgcgtttttcgaaaaagcggaagaaaatgtccgcatcatcaatgaagaaatgaagggatcttcttgtaaagcgaaagtcttcccgctcgaagatcaagatgcgctgcgtgctgaaatcgcttcaagcgatattttcacaaacggaacaggtgtcggcatgaaaccgcttgaaggcttgagtgttattgaagatacatccatgctccgtccggatttgattgtgacagacgtcgtttacaaccccgttacgtcgaaattgcttgaacaagctcaagcagccggctgcaagaccattaacggtctcggcatgatgctttggcagggcgccatggcgtttgaatattggacaggccgtgaaatgccggttcagtatattaaagagcaaatgtttgaataacctattgtgacagaagcgccgaaggacaatccgtcttccggcgctttatctttttccccctcctctctctttcttctcatgcgccaaaacgcttataatggatgtaacgaataaaaaccaagtgaggaatgcgacgtatgaaacagcaaaaaaaacgccgggtgacattgcagcaggtcgccgaacatgccggcgtctcaacatccaccgcttcattaattgtccgcaataatccccgaatttccgaagcgacccgtgagaaagtgctgcaatccatgcgggagctggggtacgtatatgatcgggtcgccgcgaatttacgatcacagacgtccacaacggtaggattgattatcactgacatttccaatacgtttttctcagagtttctgatcggcgttcagaatacgcttgaggaagtcggattaacggtgctgttaggcacgacatttgattccgtcgccaagcaggagcagctgatctcgaccatgctggagcacagggtcggcggattgattttgtgtccggtttcagggacggctgaggaaaccctttcccgccttgagcagcttgacattccggtcgtgctcgccgtcagggagattgccgatgccaactgtgattttgtcggagccgattatgaggaaggcacctataaggcagtgcgtcatttcattgagaaaggccatcaggagattgcgtttctgggcggcgtgaagcactcatcaacatggacgaagcgtatgaaagggtttaaaaaagcactccgtgaagcggatctggaagtgaaaaatgaatatgtcattgacagcgcgccgacccgcgaagcaggctgtgacgccgtgacggagctcctccgccggtctgagcgcccgaccgcgattttctgcttcagtgatttggtcgcattcggcgtcatgcaagggatcagaaaagccgggctcgttccgggcgaagatattgacattgtcggctttgataacgtgccggaagctgaaatttcttatcctccgcttacaaccgtttcttcctttccgcggcagtcgggaaaagaagcggctcaattgctgcatcataaaatcaccaattcccagcacaaaaaacaacgcattattctggcgcctgagctggtcatccgggaatcttcacaaaaaaagcggaacgcctgatacggcgctccgcttttatattacgcaagcagttttaatgattcgcggttgaatgccggaatgtcatccggtgtgcggcttgtgaccagctggttctggcagacgacgacttcttcatccaccacattcgcgcccgcgttttccatatcgattcggattgaagtaaatcctgtcgctttgcgcccgtccaatgctttcgcgttgatgagaagctgagggccgtggcagatagcgaacaccggttttttatcatccataaacgctttggcaaattggacgaaacggtcatccgcacgcagcatgtcaggtgagaatccgcccgggatcagcaatgcgtcaaagtctttcggattcacatcatcgatggacgcgtccactttcacttccgcttccccttgttttcctttgactgtttttcctttttcctgttcaattacggttaattcatgacccgcatctttaaaagctttcgcaggttcagtatactcgacatcctcaaagtaatccgttaatacaactgcaatttttttacccatagttactacctcctgcttgatgaagtctacataaatccatgtaccccagccacactaacatcaaacataggtaacgcgtttaccgcccgcctgttttacataggtcattatcctcattttttatcttttcacaagaatcatcatgaaatctatataaactttcacaaaatattcttacaatggtactgcatgacaaaatttgttgaaaggtggagaacaggtgagaatacagaaaagacgatgcagcgtcaatatgacactccgtattctgctgcccctagttatgatacttagtctgatcctcccaacatcacccattaaagcagaagaaaacaaatcctccagtgtgaatctcagcattttagccacaactgacgttcacgctaacatgatggactacgattactacagcgacaaaccgacaacggaattcgggctggcccgaacggctcagcttattgagaagcacaggcgcgaaaacccgaatacggtgcttgtcgataacggagacctgattcaggggaatcccctcggagaatacgccgtaaaatatgagaaaaatgatatcatttcaggcgcaaaaacccatccgatcattgaagtgatgaacagtctgcattatgacgcaggaacactcggcaatcatgaatttaattacgggcttgaattcctggacgggacaatcaaaggcgctgattatccgatcgttaacgccaatgtgaaaacagtaagcggcgaaaaccgttatacgccttatgtcataaaagacaaaaccgtcacggatgaaaacggcggcaagcatcagctaaaagtcggctatatcggctttgttcctccccagatcatgacgtgggataagaaaaatctcgaaggccgcgttcaggtcgaggacattgtggaatccgcaaagaaaaccgttccgaaaatgaaagctgaaggagccgatatcgtcatcgccctcgcccacagcggcatcgaaaaaaaagcgcagtcttccggagcggaaaacgccgtttttgacctggcaacgaaagtcggcggaattgacgcgatcgtatcgggccatcagcacgggcttttccctgatgccgaatacaaaggcgctgctcaattcgacgtcgataaaggcacgattaacggcatccccgttgttatgtcaagcagctggggcaaatatgcgggcgtcatcgacctccggcttgaaaaaacagacagcgcgtggcatgtggaagatgcaaaaggcagcatcgagccgattgccggcaatgtgaattcggaaaacgaaaccgtcgtcaataccgtcaaaaaagcgcacgaaggcactttgaaatacatcagagaacccgtcggccagacaaaagccgatatcaacagtttcttcgcccaagtcaaagatgatccgtccattcaaatcgtaacggatgcgcaaaaatggtacgccgaaaataagatgaaggatacggagtacaaagatctgcctatcctctcggcgggcgccccgtttaaagccggcgggcggaacggctcaaactactatacaaacatttccgctggcgacctcgccatcaaaaacatcggcgatttgtacctgtatgacaacacggttcagatcgtcaagctgaacggaagcgaagtgaaagactggctcgaaatgtccgcggggcaatttaatcagatcgatcaggcaaaaggcggcagccaagcgcttttaaatgacgcctaccgctcatacaattttgatgtcattgacggtgtcacctatcaggtcgatgtcacaaaaccggcgaaatacaacgaaaacggaacagtcattcatcccgatgcaagccggatcgtcaacctttcttatcaaggaaagcccgtcagcgccaagcaggaatttctgatcgtcacaaataattaccgcgcttcaggcggcggaggattccctcacttaagcaatgacaaaatcgtatactcttctgccgatgagaacaggcaggtcttaatggattacatcatccagcagaaaacgattaatccgcaggctgatcataactggtccatccttccggtcaaagggacaaatctgacatttgaatcttccttggccgcaaagccgtttgccgaccgcgcagatgacgtcgcctatatcggtgaatcacaaaacgcgggctacggacagtacaagctccaattcaaagatgatgaaccgggcacagatccgccgaaagatgacgcatggaaactcaccgttatgcatacaaatgacacgcacgcccaccttgataacgcggcgaggcggatgacgaaaatcaaagaaatcagaagcgaaaccgaccgcagcattttgctggatgcgggagacgttttctcaggcgatctctatttcacaaagtggcaggggctggctgatttaaaattgatgaacagcatgggctacgacgcaatgaccttcggaaatcatgagtttgataaaggtccgggtgctctcgccagcttcttgagcggtaacgggagcgcgtctgacccgtccgggaaatacaattttcaagcacctgactttccgctcgtcagctcaaatgtcgatgtgtccaaagagtcaaaactcagaccattcatgaaaaaagcagacacatttacggcagggaaaaagaaaaaagcaggcatctatccatatattctgcttgatgtaaacggagaaaaagtcgccgtattcggcttgacgacagaagatacgtccgtcacatcaagcccgggaaaaagcattgtctttcatgatgccttccaatccgcacaagatacggtaaaagaaatacagaacaaggaacatgtcaataaaattatcgccctgacccatatcggacatcagcgtgatctcgatctcgccaaaaaagtaaaaggcatcgacttaatcgtcggcggacatacgcatacgcttgtagataaaatggaaattgtcaaaaacgaagagccgaccatcgtcgcccaggcaaaagaatacggcgaatatttaggccgtgtcgatgtcgcatttgacaaaaacggcgtcgtcctgccggaacaatcctctcttcaagcgctgccggtgaatgagcagacgaaagaagacccggatctgaaaaaagagcttgatccgtttaaaaaagagctcgtctcagttaaaaatgaaaaagtcggttcaacgaaggtcgcacttgacggccggcgcgagcatgtccgctccaaagaaaccaatctcggaaacttcatcgcggacggcatgctgcaaaaagcgaaggaagcggccggcgcccaaatcgcgatcacaaacgggggcggcatccgcgcgggcattgataaaggagacatcacactcggcgacgtgctgaatgtaatgccgttcggcaacacgctttacgtcgcggatttaaccggaaaacagatcaaacaagccctggaacaaggattaagcggaattgaggctcaaggcggcgccttccctcaagttgccggtttaacatacacgtttacactgaataaaaagccgggacaccgtgttcttcaagcttcggccgtacaggatgacggcagtgtaaagccgatttctgataagaagacatacagagtcgccaccagtaactttgtcggtgaaggcggagacggatattccgtctttaacgaagcatcccataaagaagaccttggctttgccgactatgaggtcttcgttgagcagcttgaaaaagcgggaaaagcggtggaaccgaaagttgacggccgcgcgcaggaagtgtacctgccgacaaaacaaaaaaacggttcgtggacgcttgaagatgacagcgcatttgccgtctatgccaaaaacgccaacacgccgatcgtgtattacgataagaatgacggcgccaaaaagccgattgatctcagcgtgaccaaaaaacaaatcggcctgttaaaggacagaacatcggattcttcccttacgatcctgcatgacaagttcagcatgaaaatgccgatggcaaacgccgcttcagctgatacacgattcggcgtggcgccgaaaggaaaagttagcggggcgctttcaaatgtatacgactttacaatgaagcagaaaaacaaagacatcaaaacattcaaagcgccggtaaagctcaccctgcgcattgagaatatgaaaaaggcgaaacagcccggcatttatcatgtagaccggaaaaagaacgtctatacaaaaacagacaacggttcggtttcacacgatctcgtcacgggctatacaaatcatttcagtgaatacaccatattaaacgcaaacacgaagagcgcgccgccgacaagcggagatcacggctccggaaagcagccaagcggacaaaaaccgtcatccggccctgcgcaggacggagtatcgccgggcggcctgcttcctgatacagccacaacgatgtattccatccttcttgccgggttactcatcagcgcgctcggaacggcactgtatctgtaccaaagaagaaaagcaaaaaaagtgaacgaagcataaaaagaccgcttttatcgggcggttcatcccaagagctctcctgatctgatatcaggagagctttttctgccggtccccctctgagtcgacagccgtacggccgagtgataaaatatgaacgttattcgcgaaagactgcatccgcatcgtttaacacttcacggcggagcctctcttttacacggcgccgcctgtttggaggactttttttgaagattacaggaaacaaacgaaaccgcatgtcttacaagaaaaagctgttttacgtgataacagcgctttgttttatcagctcgatcatttttgtcactcacaacgcttctttttatgagcggccgattgccagagtgacgaaaacaactttggaacaccaggcaaacgtacaggacatgcataaaaacaaagataagattttcaatcagacgatcactgccagacttgaaaacggcagtcagaaagggcagctcattcatttgtccaatcagtattctttatccggagcgaatgatcagaaatattcgattggcgatgaagtattcgtttctattgataaagggaaaccatcaaacaaagatatatcgggaagcattatagataaaaaacgggataaacagcttttgctgatcgcttgggttttcatcttcaccttgcttatcgtcggaaaaaaacaaggcttcttttcgatcgtcagcctgatgtttaacgccgttttactgtcgtttgcattagatttgtacaggaagcatcctaatatagggttaatttttatctgcggtatctgtattctcatctttacggtcatctcattgctgcttgtcagcggttttcacgcgaaaacatatgccgccatagccgcgacgctcgcaggcactttcgtttccctgctgattacgtatctggtgatgctggcaaccggagagaaaggtctcagatatgaggaaatgcagtatttaacccgcccttatcacacggtgtttatggccggggtatttatcggatcactgggagcggtcatggatgtagccattaccatgacgtcatctgtcttcggattatatgaagaaaacaagggtatctcattacaagctctcagacgttccgggatggagatcggaaaagacatcatgggagcgatgaccaatattctgttttttgcttatataagcggctctattccgatgatgcttttgtatttgaaaaatgattccccgataggattcactctttctatgaacatttccttggaaatagccagagcattggccggggggatcggaattgtattaaccatacccgccagtctgtatgcttctgtcttttttattaaacaaaagaaggcaagctcatgaatgtcatcgtaattctcgcggcgattttatttctattaatggtcattatcggcggaaaaaaaggagcgaggtcttttattgcgttattcttaaatttcggggttctctttctcaccattattttcatgacagatccgcatatcaatccgattgttttaacattgctctcttccgccgtgatttgcagcattactcttttttatattaatggaggaaacgtcaaaaccgtaaccgcctttatttctgcgatgctgaccattgcattgctgctgttttttattatgtccgtaacaaaacatacttcgattcagggattcggtgaagaagaattgggggatatcggcatattcacactgtttgtcggggtggattttgtgaaggttaccgcagctatgatcatcatgggcacgattggggcgattactgatgtcgcgatttccattacttcacccatgcgggaaatttacagtcataatccgtccatgagcagaaaagaactgtacacattcggattaagcatcgggagagatattttaggaacgaatacgaatacgttattctttgcttttttcggcagctatttggctttaattatctggtttaaagacttatcatactcagctgaaaaaatagtgaactcaaaagtattcagtgcggaagccgtcaccattctttgcgccggaatcgggatcggcatcatcattcccgttacgtcctggatcaccgcctgttttttagcaaaaccaaataaacattaaaagctgccgggacacgcccggcagctttttttatcttatacccactttacaacgtcttttgaggcagatcttgttttcgggcgcggttctctgacacggtagccgaatgcggccatgacagagatgtcgaaacttccgttttccagaagcccttcttcttcaagaatccggtggatctctttgtagttgaagccttcaacagggcaggaatcgatgccgatctgcgcagcggctgtcatcatattgccgagggcgatgtaagtctgtttggatgcccagtcaaacagcgcgcgatctgattcaagcagattgaaatcatttttctggaagtcttccgttttgctgatatagccttcatacatatcttccggcatttttttgacttcccgcaagtggtttttgacatagtcggcgtcaaaacggatatcctttgccgtccgggcaagcagaagtacgaaatggcttgcggtcggcagctgcttttgcgccccccatgtgaactcgcggagtttttcacgaagctccggattttgaacgacgacaaatttccaaggctccaaaccgagtgagcttggggataatcttcccgtttctaaaatgaattcaaaatcgctttctgaaatttttttctcaggatcaaattcctttgtagcgtgtctgaattgatacgcttcgatgatctgctgttttttatctgacattcatgatctctcctttttatctcgttatgtactattgtagccattatttttgaaagtaccagtacgcacatttttgttggatagtattcattttgatactgacaaaaaaacgggctgccgcggcagtccgtttttatttttctcttctcgcaaagtcgacgaaacggaatttatcgagcctgtgccggctttccgtgtactgaaagaggctggtatcctccaaaaagacgcggtttttcacgaccgccatatggctgaacccgccgagatccaaatacttccggtcttcctcccccgccggctccacgacaatttccttttgcgcgtagctgatggacaggccgagctctccttcgagatactcatagatcgaatcttcacaaatcgccttcgttaatagaggcacatgttttttcacaaagtaatccttgtccaaaataatatgttctccgtcaatccgtcttgatctgacgacttcccacaccttttcatccgccactgtaccaagctcttttgcggcttctgagggaggcaggatcagcccgagacggtgaacctccgttcgcgtctcttttccgagcgtttccgaaagctctttgaagctgatcaggcctgagacgggaaagcgcattttttctctgtctaatatgacggagcctttgcctttgattttctggatgtagccgttttgcgccagcatattgagcgctttacggacggtttctcgtgatgtgccgtattgatcgcataaatcattttcagacggaagaacgtcttcagccttccgctggccgctttcaatctgccgcaccatatctttatagattgtgatatatttattcactttcattcatgaccacccagattagtgtatcacgcttttgtcagatgataaacgatcgattcatacggacggagcgtcaatcgttccggccgcccttccctcggttcatcattcgtcagcagcaccgtaaaccgccagccgtccgtgtctttaagcggaaccgtaaagtccgcttctttcccgtagaagttgttgatgcacagaagtttttcatccttgccgtgtctgacgtacgccagaaccgccggatcatcttcagcaagcagctcaaacgttccttcagtcacgatgtcatattcctttctgagcttgatgagcttctgataatggtagaaaattgaatccgggtcccgcaaagccgcttccgcgttaatgtcccgataatcatccgccgccggaatccaaggcgttcccgtcgtgaagccgccgttcggcccgctgttccattgaacgggggttcttgcattgtctcttgatttctcttttaaaatggcgataatgtctttttctgacacgccttcttccttcatctttttgtaaatgttcagtgattcgacatcgcggtatgagccgatgtcatcgaacttcggattgcccatgccgatctcctcaccttgataaatgtaaggcgtgccctgcatcatatgaatggccgccgccagcattttggctgatttcgtccggtatacgccatcgtctccgtatctggatacggcccgcggctggtcatggttgcaccagaataatgcgttccagcctccgccgttttgcatctccgtctgccaaaacgctaaaatccgtttcagcttcagaaaatcaaacggagcgagcgcccatttttcaccattcggataatccacttttaaatgatgaaagttaaaggtcatatcgagttctttattttcagggtttgtgtaccggatgcagtggtcagccgttgtcgaggacatttcaccgaccgtcatgctgtcatatttcgaaaacacttcccggttcatctcatgaagaaattcgtgcacgcgcggcccgtccgtataataagggcgcccgtcacgaccatcctcggcatcaggaaacgattggtctttagaaatgaggttgatcacatccagccggaagccgtcgatcccttttcggaaccaaaaatgcatcatgtcgtaaacctgttttctcatctcttcattttcccagttcaaatcggcctgcgacacatcgaataaatgcagatagtgctggcctgaggccggatcgagctcccaagcggaaccgccgaattttgattcccagttgttcggcgcccggccgtcttccttgccgtctttccaaatgtaaaaatcccgatacggactgtcgggtgacgaaaccgcttctttgaaccactgatgctcgactgatgtatggtttacgacaagatccatgacgacctttattcctcttttgtgcgcttcatcgagaaggcgttcaaaatcctccatcgttccgtattcttcataaatggtgcagtaatcgcgaatgtcataaccgttgtcattctgcggcgaatcgtaaatcggcgtaagccaaatgacatcaatcaaaagcttctgcaaataatcaagcttctcgataataccgttcagatcaccgatcccgtttcccgtcgtatcattaaagctcttcggataaatttgatataccgctgcctttttccaccatggtgtgctgtctgttttcatttttcttcaccgcctgtattgttttgaatggaaagggaaaagggacagcctgttagaaggcgccccgcaggttttctatttttgccgtttcagccgcgcatacccgtatgttcccgcaaacgggagtatcagcacgatcagcattccgatcgcaaacggaccccagtaccggctcataatggagaagatccccgggacgccgccgactccgaccgagcttgcgagaacgcctttgacggagatgaacatccccgcaatccccgagctgatcatggcgatcacaaacggaaatttgtaacgcagattcacgccgaaaatcgccggctcggtaatgcccaaatatgcggaaatgccggccgtcagtgaaagcccccgctgttttttatcttttgtaatgagcatcatggccagagccgccgatccttgagcgatatttgataatgcgagcatcggccataaaaatgtgccgccgagctttgatccgattaattgaagatcgaccgcgagaaacgtatgatgcatccccgtgatgacaagcgccgaatacagccctccgtacagcaggcctccgatggcggagaattggccgaaaacggcaatcaatcccgccgtcagcgcgttaccgatcgcaaaggtgatcggaccgatgataacaaaggatagaaaaccgatgaccaaaagcgtcaccggcgcgacgaccaacagctgaatgccctccggcgtccgtttcgtcaaaaagagctcaagcctggcaagtaaataagacgccagcagaatcgggagcacctgaccttgatacccgactttctgcacctcaaggccgaacaagttccacaccggaatatcgccgctctgctcggcggccccgtatccccatgcgtttaacagatcaggatgcaccagcatcagcccgagcacgatgcccaaaagcgggcttcctccgaaccgcttcactgccgaccagccgattaaagccggcagaaaagcgaaggccgtccccgcgatcagattaatcatattggcaagatccgcccattgcggatacacttgaacaatcgatttcgtgctgtaaaaaatgccttccgccgttaagatattgttcagacccattaaaagcccggccgtgacgatcgccggcaagatcggaataaagatgtccgcaagcgttttcatagcacgctgtaaaggattcattttttgcgatgccgccttcttcacgtcatccttggacgcttccccgatccccgtttccttcactaattccgcatatactttgttgaccgtcccctgcccgatcacgacttgaaactgcccgtttaccgcaaaagatcctttgacaatgtctattgcatcaagcattttttggtttaccttggtttcatctattaatgcaaaccgcaaacgcgtcacacaatgagtcgccgcctcaatattttcgattccgccgacagcttcagcgatctgccgcgcagcccggttaaactcacccatgccaacccctccgtaaccgttttcattttgtctcaaaaaacttgtatatacatgtttatgactctattgtaatgatgtatatacatgtcgtcaatctatttttatagcgctttcatcacaaatatactgcgaaagaccctgaaacaaaaaaagccccgccggaaccgggccttgacttcttgtttggtcgggaacatgtccgggcggaattcacaacaggagcacaaaaagcatacagtactgtacaactaagttaaagaggtgtgaagagatgccatccactgttatcaacctgtactatttgaagattaacagtatttctggcaacggatctattacgattggggaagcggcatacaacagtcccaccacaaataacaaatcacaaggactgaactcttcattcggcgatacgtcacctatagaatcgatgatggagaacttgttaaatgatcctgatgtcaacgaccagacagccatcggaaccgcagataccgcaaatattacgccggtgccgcccattatagattaaaggggtttttatgaatgccttaccaaattaacgtcgtcaatataaaagtaaacggagcaacgcaaaacggaaacgtcgatatcggtcagaccgtacaaaacagccacaccgccaacagcaaatttgtcggcgcgaacttttctttaggggatttttcgccggccgccggatgtttgaattcgggccatcttgaccctgacgtgagcgatcaggatcagatcgccaacccgtcaatgccgatcgcaaatcaaatatagggaggttctgccgaagtggatatcgaaaaaatgagaaagtggcttgagattacgaacgagcacaagcccagcgacttttggaccaatgtcctgaaacggaaatctcccgaagattttttctccttacaaaaaaacaccctgacttatgatatttatcaggatgaacagcacacatttgtcattgtggaaatgcccggcgtttacgaagaagaattgacattgaggctgctgtcaagaacacggctgcatataagaggaaacatcacacccctttttccgaagaacatgggcgtctgccaaaaccggtattacggggaaatcgatgagacgattgagcttcctgaaccggctgagccccacctgttacaggcgcagtgcgtaaacggcctgctccacatttcctacccgcgccttatggagcacattccttttcagaaaaaaatataaagagccggcttacgggcggcccagccgtctgtacactttctccttataatgagaagatgcgggttttgagaacatggctttctcctccgtcagtttgtcgagtctgacttgtttttccgtccgtttgttccgcaggtgatcccgctcctgttcattgcggcacttggcgatcaaataatcgagcgtcatcagctctttcttcagcgcgccctcatcctcggcgatcccggcgttttttaatatgcggtagcccattctgagcgactccggaagatgtgcggcatcgtctttcggcaggggctttcccattccattgatgccggcgaactctccatccttaatggcgcgcttgattttatcttcagccacgatatgcgcaatatccatcactgtttacctctttcttcaatagaatcgggtgtgatcatacggaaattcacatcccagtttgtgccatttgtgttttttaaagctgtcattcaacagatcaaccgccgctgcgacagcgtttttcgccctttttccgatgagccttttccaccttttctatttgctggtttcatggtatattgattacgttcgttttttctatcgttccgtgtaaaccgtgatcggaaaaaaggagtgtaacaatgaaaacatttataaaagaaagaggacttgccttcttcttgatagcggtcgtgttattgtgggtgaaaacatatgtcgcttatattttaaactttaacctcggcatagacaacacgatccagaaaatattgctttttgtgaatccgctgagctccagcttgttctttcttggatttgggcttcttttcaagaagaaattacagcagacagccattattgtgattcattttttattgtcttttttgctttttgcaaacatcgtctattatagattctttaatgatttcattaccatcccggtcatgatgcaggcaaagacaaacggcggccagctcggagacagcgcgttctcgttaatgagatggacagacgccttctacttcctggataccgtcattttgattattttggcccttaagatgaaaaaaccggctgaaaaaccggcgaagaaatcattcagaatcgttttggcttccgccgtgcttgtgttcctgatcaacctcgccgtcgcggaatccgaccgtcccgagcttttgacacgctcatttgaccgaaactatctggtgaaatacttgggcacgtacaactttacgatttacgatgccgtgcagaatgtgaaatcaaacagccagcgcgcgcttgccgattcaagcgatgtaacggatgtggaaaactatatgaaggccaactatgacgtgccgaataacgtctacttcggaaaagccgaaggaaaaaacgtcatctacgtctcattagagtctctgcagtcctttatcattgattacaaaattaacggcaaggaagtgacgccgtttttaaacaaactggcgcacgataatcaaacattctactttgataactttttccaccaaacgggacaaggtaaaacatctgatgcggaatttatgatggagaactctctgtacccgctttcgcaaggttcggttttcgtcaataaagcgcaaaacacgctgcagtccgttcctgcgatcttaaaaggcaaaaagtacacgtctgccgctttccacggaaatacgcagactttctggaaccgtaacgaaatgtacaaatcggaaggcatcgataagtttttcgattccgcttattatgacatgagcgaagaaaatacgaaaaactacggcatgaaagacaaaccgtatttcaaagaatccatgccgctcttaaagagcctgccgcagccgttctatacgaagttcattacgctgtccaaccacttcccgttcggaatggataaagaagacacggacttcccggcgggagactttggcgattcagtcgtcaataattacttccagtccgcgaactatctggatgaatcaattgaacagttctttaatgacctgaaaaaagacggcctgtacgataagtcgattatcgtgatgtacggagaccactacggcatctccgaaaaccataataaagcgatggcgaaagtgctcggcaaagatgagatcactgaatacgacaatgcccagcttcagcgggtgccgctctttatccacgctcccggcgtgaaaggcggccgcaatcataaatttgccggtgaagtcgatgtcgcgccgaccgttcttcatctgctcggcgtcgatacgaaagattatctcatgtcaggttctgatatcttatcgaaagagcacagagaagtcattccgttccgtaacggagacttcatctcgccgaactatacgaaagtgtccggcaagtattacgatacgaaaaccggaagacttttagatgattcagaagtcgacaaaaaagaagactctctcgtcaagactgagcttgaaatgtctgataagatcatcaacggcgatctgcttcgtttctatcagccgaaaggcttcaagaaagtggatccgtcacaattcgattatacgaagcgtgaagattcctcagcagacgatcaaaaagaataaacaaaagccagatcattgatatgatctggcttttttatgttcagctcccggcggcggccatagtgcgcttttgcaggctgtcggaaagaactgaataagcgattactttctttttctgctgcttgacgacatctacatgatcttcgtagctgtatacaaacaccgtcacatctttttttccttttctcgtcttaatgacaagcggatcggctccgttttgcggatgaagataacgctcttcatcccctgggtatatataatgccgttcgataaacacggcttcgttaaaatcatcaatcacccgtcgtttgtcttcgccttccagacgttttcccccgagggaaacggcagcggactcgtcactgagctttgaatgggtttcaaacttgcggaggatccattccaccgctccggtaggaaggcatgtcagcacaatcttaatcaggcttatgacaacaattgaaacaactgcaatccatgtcaccttacatcatctccatacttgttctacatgaatcttaacatagaaggaaacattgttttttgtacattatgtgaaacttgatatatgttcaaaaaaaatccggatcacataggtgatccggatttttcaagtctgcttctgatcgtcaaggcggacggcctctctcagctcttccgcgacaaattcgacgttcggcccgataatgacctgcgccgttttattccccgttttgataaccccttttgctcccgcttttttaagcgccgcctcattaatgagagacgtatcctgcacggtcagcctgaggcgggtcgcacagtgatcaatcgtttcgagattttgcctgccgccgagccccttgagcatggcatgttcttcgacggaaccggccgtatcttcactaagcacttcttcctcttcctcatcatcttcccgtcccggcgttttcaagtttaacgttttgatgagcatataaaagacggcaaaatagatcaccgcataacaaagcccgacaacgagcagcaaaagcggtttttcggcaatgccgtagctgaggagataatcgatcgcccccgccgagaatgaaaaacctgacctgattccgagaacattcacgataaataaagagaacccggttaatatagcatgaaccccgtacaaaagcggtgataaaaacataaatgcaaattcaatcggctctgtaattccggtaataaatgccgtcagcgcgagaccgatcatcattccggccgtcgctttgcgcttacttggcttagccgcggcaatcattgccagacaagcggccggaagcccgaacatcataatcgggaagaatcccgtcatataagtccccgccgtcggatccttcgcaaagaagcgggccagatctcccgtttttccgtgaaaatcgccaaactggaaccaaaaaatattattcaacacatgatgaagaccgaatggaatcaaaagccgattaaaaatcccgtaaatccccgcgccgatcccgccaagcccgatcatccattccccgaaggacgtaatcaccgactgaatcggcggccacacaaatccgaagatacccgccaaaataatggtaatcagcgccgttacaatcggaacgagcctgcgcccgctgaaaaacccgagatattcgggcagcttcgtatccttaaagcgattatacgtgtatcccgcaattaaccccgcgataatccctccgaaaacggccatattatttgtcgaattgattgattttacagccgcgtccagcatgatataagaaatggctcccgacagagcggcggccccgttgctgtctttcgaaatcccgatcgcgattccgatcgcgaaaatcagcggcagatgatcaaataccgcggtccccgccgcgtaaatgaacggaatatttaataagtcctctctgccgatggccaaaataataccaacggcgggcagaacggcaatcggaagcataaaagactttccgagtttttgcaaaaattgaagcattttacccatcccccttcttttttcttaaatataccacataagttatctagtgatctataccaattttccttcatttattcacataaggcttgttggttttctatttataaaccagttgtggtaagcttgaatcagatgattaaaaatagaaagcgggaatgacaatgattgtaacgaacgatcaagaattagaaggccttaaaaaaatcggcagaatcgtcgcgctggcgcgtgaagaaatgaagaaaaaagccgagcccggcatgagcacgaaagatcttgacctgatcggaaaggcggtgcttgacgagcacggagccgcttccgctccggagaaggaatacgatttcccgggcgtgacatgcatcagcgtaaatgacgaagtcgctcacggcattccgagcgcctctaaaatcttaaaagccggagatcttgtcaatatcgatatttcggcggagttcggcggtttttattccgatacgggcatttcatttgtgctcggagaaggcgatgaacgtctgcaaaagctttgtaactgcgcggcatccgcatttcagaaaggattggatcaggcaaaagccggcaaacgtcaaaaccagatcggcagagccgtctaccatgaagcccgctccaacggatttaccgtcattaaaacgctgacgggccacggaatcggcagaaacctccatgaagcgccgaaccacatcatgaattactacgatccgtttgataacgcgctgtttaaaaacggaaccgtgatcgcgcttgagccgtttatttccacgaaagcggaaacgattgttgaagcgggagacggctggacatataaaacgccggataaaagccttgtcgcccaagtggaacacaccatcgtgattacaaaagacaaaccgattattttaactgcattgtaatgtttcatctccctcccgaacaggtatacaacaactaacccgaaggagggagacgcatgaaaaaagataaagaaaaaatcaaaattgaaaacgaaatacacgccatgcacggcgtaacgaaacagcagattttagaggatttcgaggaatttaaggcgtaccttcatcagaaaatttccgccggaaaaaaactgggtctggatgacagcaaaatcatcaaaagcgccgccatcctcggggactatctcgccaaacacgaggagccccgcaatgcggaagaaaaactcttacaagaactgtgggacatcgcggatgataatgaaaaacagcatttggcccagcttctcgtcaaacttgccggacactgatacagtgcccggcttttttatgctccgttataagagttgtgctacactggacatatgtctgtgaaaggagccatttttcaacatgtggtttattatcttcgggtttattttctttattgaaagcatcattctcaccgtttacggggtgaagaaaaagaaggggatgctgatttatttcggcgtcgttttcggaatcatgacactcggaacggtgctgttaaaattaaccggccattaagcatgaaaagaccgccctttacatatatatgtaagaaagctttacatctctgaatcgaaaggctcagtttttgcattatcccttttcagcgtctttttatagatgttacaatgccaaaagtttggcaaaaactgaagaaacctccccagcgggagaacggagaaaggagttttctgacatgcattatggcagtaaaggctggtatgtagaagagttaaagaaaaaaggaattacccactatgaaggaagaaagcttcaaagcttcaaaaagtacttccttgccaatctgctggaaacaaagaaacaagcataacgtaaatcagccgtgctgtcagtgcagcacggctttttttctatacattagtgagcctgtccctttttttaaggaaggactccctccagctttctgacagcgcttcttcccgcagtatttcttcaatcgctgacagattgtctgaatcacggtatttcacttcgttcgcataccagacggaaatgctttctttgcctctcgacagacgcttgaggacgggacgcggatcgacatatccttcttcaagcaccctgaaataaaagccggtaaatcccgtctgctgtacacggagcaccatatctttgatgccatatttgagcgcgagtttgacgcagggctggcgcggctggcttacttgaacgacggcttcacccagctgaaagatgtcgccgatccacacgtcttgttcggccagtcctttgaccgttacattctctccgaacgcggcggcgggaagttttctcgcgagcgttgtttcccaatatgaataatgctcggcgggatacacgcacaccgctttatcgggacctccgtgatgcttcagatcagcctgcccgtccccgtcaaaatgggttttatacagcatgacgggagaatctgcgggccgcttgatgatgcctgaattgatttgtctgccggcaaattcatgaattgcgggctttccgagattgatagataagacagaatagtcttgcgtcatctcgttcacatcctttgcgaaatatcctacctttcctttatcatagtaagaaaaaggtggtttttccatgcttcagtatcatatgattgcagacggccgggttcagggcgtaggttttcgctacttcgtccagatggaagccgacagacataagatagccggctgggtaaaaaaccgtgatgacggccgggtggaaatccttgccgaaggccctgaagagtcgttaaaacaatttgccgaagcggtcagaaaaggcagccccttctcaaatgtcacaaacgtaaccatcgaagaatcacaccgtctgaaagggtaccgcaccttttccatcagttactgataaggcttgtcctgataaaaataattcggcttcacaatcgtattgtcatatgatttatggaaaatgtgggtggaagccggcgagatcggcggaatcagccaggtccagtcgcccgtcagctttctgcccgcgtcttgttcctgttcttcaaagcgtttaaattgattcgcggccgtatggtgatcgacaatgctgacaccgtgttttttgtatgaatagagcactgccttattcagttccaccagcacctgatctttccacaggtcggtattcaggctggcggaaatccccatgaccgaagcggcttttttgagcatatcataccgcttttcgtcagcaaggttccttgcgccgatttcagttcccatataccatccgttaaaaggcgccgcgttgtacgacagtccgccgatttcaagcctcatatcggcgataatcggaaccccgtaccacctgagatttaaatcggcaaactcttcaatatccggatgggtgatcggcacttctttcacgagcgtctgaggcaggtcataccagaccggctgcccgtcccctttcatccggaaaagcagcggcagaatatcaaattcggtccgcttcccgcgccagccgagtttttcgcagacagccgtcagctcatatgatgccggatcaccgactcttcctttttcagtctcatatcccgcatagcggatgagctggtgattccagatttccacttgtttctccccgttcttctcaggagggaaaatcgtaatcgtcggtttaatttttccgccgttcgtggcgatttcaatatgttcaaataatgcgtcacgcacctcttctttcgtgttcacattgcgccggtcaatgacgttcagcgattgccagaacagacgcccgatacagcggttgctgttgcgccacgccattttcgccccgtgttcaagctcttccgccgtatggacgtaacttcccgtccgatctatctcatcttttatcgcgtgcagtcgcgcgttgatttgcgattccattccgagttcgtgatagcagacatcaataaaatccttcgcctcatcccaaagtatttccgtatgtttcaaaaaactctctccttcaatttacatctgtttcccattgtatcgtttttaggtgtgaacacaatggtttttttgtatcatactggaaactgcgaagaaaaaacacctgtgattttcgcaggtgttttacaaaacggaatgcagtttttcagccagtgtaagcaaatcctcacggtagttttttcccgtcatcggaattccgtgacccgtcaaaagcgcttccggctccagttccgccaatttctgaacggatgcggccgccgtctgcgtatccgctgtaaaataggcgggcggaccgtgaagctcttgcttttgaatgacaacgtccgcaagcgattcctgttcaacagtgatcacggcatcaccggcaagcagcacgcggtctttatcccggaataatgaaatatggccgggtgtgtgaccgggcgtatgcacccatttccattcttcaagaaacggaacggtaccgtctgaaggcagtgcctgaacggacggaatgcggatcgtatggcgcggaaacagcggtgacagctttgcgacaagcccttttttcgcatcgggcctggcaggcggataatccgctttccccgtgacgtacggaagctccttttcatgaatgtaaaccggcacattccaaagctcaagcagttcttcaatcgcaccgacatgatcaaaatgaccgtgtgtcaaaatgaccgccttcagctcatacccctctttgaaccggcgtttcatttcatttgtaatcatctccgacgattgaggcattcccgcgtcaaccagaatgatttcccgcggagctgagggattttcgataaagtaaacattcgcaatctgcacggtcagtccgtaaacgccgtccgccgctttaaaaccggcgccgcttctcactgaaaaaagcggcataaacggatcactcatcatggcacctcctctgatgcctttagtgtgcgacgaaccgggtgttttatgttaaaaaatcgtgattgcgccgatgatgagcgcaaaggccgtcatgacgataacggcaagaaccgcccatttcatcgcaaatttctgatgttcatcaatggtgaccccggcaagcccgactaataaatgcgtcgacggcacgagcgggcttaacatatgaatcggctggccgataatcgaagcgcgggcgatttccaccttatctacaccgtacgccacggcagtctcagataaaatgggcagcacgccgtaaaaataggcgtcattaggcatcagaaacgtaaagataccgctcgttaaggcaacaatcgccggaataaaacctcccatctgttccggaataagcgatacgagggaaatggccatttcatcaaccatcttcgtccccgttaaaattccggtaaacacgcctgcggcaaaaatcatcgaaccgatcgcaagcacattgctcgaatgggctgaaatgcgctccctttgatcattaagtttcggatagttgacaatcagcgcgatacaaaacgcaatgatgaacagcacggttaaattcacttttcctgacactaaaaatcccactaaagaaagcgttaacagtaaattgaaccaccacagtttcggccgcttccattcatcttccgcagccgcagccgtttcatttgtatgggacggctgctttaattcgatcaccccgagccgtttcctttccatccttccgagtacataagcgaccacaatcatacacaccattccgctcgcgatgacaggcagcatcggccccgtcagctctgccggatcaacgccgagcgcactcgccgcacgcggcgccgcgccgccccatggaatcgtgttcatgatacccatgccgaccccggcgattcccgctaaaataatcggacggattccgagcatgatatacaaaggcagcattgcgcttgtcgtaatcatatacgtcgtcgagccgtctccgtccagtgcgacaagcatggtcaaaacggctgttccgactacaattttgagcgggtcgcctttaaccagctttaaaatacgcgacaccatcggatcaaataaaccggtatcaatcataatgccgaaataaagaatcgcaaacataatcatcactgcgatcggcgccacctgttcaataccggagatcatcatctcgccgacccggttaaaagaaaacccggcaatcagcgcaaacacgatcggcgttaatacgagcgccgttaacactgaaagccgttttgtcataatcagcaccataaaaacaagcatcataagaaagcctaagattgctaacacagtatgtccccctcatcatgaatacgcttacattttaaaggcccgatcccctttatccgcctttttgctatcttatgagaattggatattgaagtaaatattttggattttaaagatttttaattttttataaccttttcgttcattttgttcatttataaatcaaaagccttccgcaaatatgcggaaggcttatttttcgctgctcatcatctctttataaaactcggtctgctcttctaaaaagcgttttgcgccgctgctgtttttataaaagctctcccaatcccgttttttcaacatttgcttccactccgcggatgaagtaatctgtttcaaagcctgatcccaataggcgatctcgccttcggtcatgtctttcggccccatgatgcctctccagtgcgcaaagacaaacggcaccccctgctctttccatgtcggcacatcgctgaagccggagagccttttgtcagacgtaacggccgccaatgtgattttccctttccgataggcgtctctcgcttctgaaatggtcattgaggcggcgtctatctcgtgactgataagagcttcaatgacttcattgctgcttccgtattgaaaaaagcggatatcaaacggagaaattccggccatttccgccgctctcgcaaaggagagctggtcatcatttccgaggccgggcgcaaatccgatttttatgccgcccggatttgctttaatatcgccgagcagccgctttccgctttttatctttgaatccttcggaagagcgacggtctgccactcttttgcgataatggccaaaggcgtaaaatcagctgccttcagccggctttgtcccaaaatttcattgcttaacagcagacttgaattcatactgatgacatccgtttttcgttcgtttacatatttccagccgctgtctccgcctcctccgggtttatagatgatctttacgggccggcctaatatttgcttccgctctattaccgattgcaaagcttttgccgttacgtcccagcccccttgaggcgctgccgggacgactatttcaaccggcccttcagctgaacggatgcccgccgcctgccgtccgtcaaaagaaaccagcgccgccagcatgacaagaagcactcccaaccgcttcatttctcccatcccttactcatgtgctaaataatatttccgttccggcctgccgataatgccgtactctaattcagcgagcgcttcttcccgagaaacgagaaactcggcgtagcgccgcgccgttgttctggaggcacccattttttctcccagttcttcagccgtcatccctttttgggccgttctgagcgcgtttttgattttttgaagcgtaatcgaattaatcccggtcggcagatcattgtgctgtttttgttctttctgaccgcttccgaaaaacatgtcaatcacggactggctcagctccggctgtgagtgcagccattctcttttttcacggtactgcaaaagcacttctgtaaatttatgtgccgacaccggttttatgacataatgggcaacgcctgatctgagcgcttcctgcagcagccttgtttcggcagaagccgtaataatgatgatatcaacggaaggaaaacggccgcggataagcgggagcagatctgttcccagctcatccggcatataaatatccaatagcagcagatcaggctgccgtttctcaagcagcgatatggtgtctttggcattgattgctttgccgatgacattgaatccatcaagatgttcgataaatttttcgtgaatttgcgctattcgaaagtcgtcctctgcaatcgcgatgttaatcacaccgattccccctttggcctttctttcggtataaacaccgtaaatacggcaccgccgctcttttgctgcgaaatctcaatcgctccctgcaactcactgacggcttctttcagattggctaagccgtatcctctccttgtcccctttgaagagtagcccttttcaaatatcgtttctgttttttcctgaggcacgccgtctcctgaatccgccacttcgatgacgatatccctgccgatatcggtcataaaaaaggatacctcttttttctctttttcggcgacggcttcgaaagcgttatcaataagatttccgatgatcgtaatgagctgggatgaacccacatgctccggcagcgattctaaaaagctgttttcatctattgaaagcttcactttcttctcagacgcctttcccatttttcctaatagtatggcctgaacccgctgtgaatgaatgttttgaaagaggatttcgtgctgttcattctggatggcgtactcttcttttatcagttcaatggcttcattatattctcccagctctaacagaccgagtatcgcgtaaagcttattcgagaattcatgcgtttgcgcccggagatcctccgagtattttttcatttcagtcagcttgttaatcagtttcttgagctccgttttttcgcggaagctgatcaccgctccgtatacttgtccgttctgcttcatttctttcacgtttaagataaatactttatctccggcacgcacctccacgttcggcggtaattctccccctgccaacaccggcatgagctttgcgcccggcatgatttcttttatatgccttccgatcatcggttccggaagattcagcatatcagccgcagataaattcatcatggttaccgcgccttctttgtttacggcgataatcccttctttcatcgcaaggagcatcgcattgcgttccctgtacagcgctgcaatttcatgcggttcaaggccgagtgtatctttacggatgctttttgcgagcgccgccgctcccccgatgccgataagaaacaccaaacatgcaaaatagcctaaatgccgcaaatgcgccttcatatctttttctatctcatcttgtagaaattcgactgtcaccgttccgacgacttcgttatgatttttttcctccaaaataaccggggcgcttccccggacggccttcattccgtcggaaaccggagacccgccgaacatgacggttttattttgcagattttgattttctttcggaatactgcttcgggccgaatgaaatgcaacatgccctttttgatcagtgatgtagacggcgtgcgcgcctgcctgttctttcatttgttcaatgacgtctaactttgtaaaagcctcttgatccgcaagccggaacgcctcttttacgggaggcatatatgaaatggtttttgccgtttgcaccgccagctgttcagcctgcttctgcccttcctttaattgctgaaaggcaaatataaccgtgagcgttccgatgacaagtattaataaagccgtaattaatccggcgattttcatttgcagagagacataaaaccgcttcgcttccaacacagcaccagccgtcctttcctcctaaaatcataccattttttaaatcttcatttctcatttttgagaattttcgcgatctttttctcttgtcatttctttcaaaaagtgcagtctggtataatttccctcaagagagataagaaggatgaactttttataatcgctgcgcaaaaaaagactgacaggagccagtctcgggatgtttcacaacggacgtatattcagttgacaaagtgtttctctatgatggctgagatacatttgaatgaccggaaatatcaatcaattttcctttgacggccaggcgtccttcggttcttaccgccttgtcgcatgtgattaatgtaatctctttatcttttgtctcctgaattgcgtttgcttctatttctgaaatcatggtttttgatgttacagaataaatatagtcttttctaaagtcggtaatcacgatttgcgcacctttttttatgtgtaaaagagggccgaacaataggttctcctgcttcagatggtggcctgccaacgggtagtttccctcgcccattttctgatccggacgcatagttgccgcgccgatcagcaggttttcattggttgtgccttttaaaatcggaaggtctaaatcgatgctgctgatggttatccgtccgattatcggtttcggtttgcgattaaaacttgactgaactgtttccctgaaaccgggcggatgaatggattcaaattcatagtccgcttttttcatgttatttttccgcgcttgttctgcggtcaattccgattcaatttggcttttactgaggtacgcaatcaaacagcctttcatgagaggagaggaaatgagaagcagcccggacaaaataagaacggcaatgatcatttttttaaccatgaagaaaattcctttcttgtacgtcatgcggtgagtatttggtgagaaatgattctctttttaaaaaagcacctgatcgattcttacatgatcaggtgcgattacgtctatctattccttgctttcttctttcttgatacaacagccgcggctccgccggctaatagcagcagaataccggccgtgaccggcatcataccgtccgtatcaccggttttcggcagatttttgcctgtatccgggtgattggttttactattggtatcagggtgatgcccgccttgattcgtttgatgattcggtgtgtctttcccaggtgcgggattttttaatttcttattagaaacgacgacctcaacagcttttgattgtcctttttcaattgtgaattcaattggtttttcgttcagctgatagccgtcaggcgcttttgtttcgataaatcgatactgcccgggcgctaatcctttcaccgtaaaccggcccttttgatccgtcttccataccgccggccgttctttgctgccgccggtgtttaccggatgtccggcagaatccgttatcttgaattcagcaccttccagcaccttatttttatcgtcatgatccacttttgtcagtgttacatcacccggcgtcagtgtattctccgcactgatttcgactggttttatgtcggtatttgtgatcttgaatgaaattggcgtttgatccaaactgtaaagttcaggcgcttttgtttcgataaattgatattcgcctgctttcagtccccgtacaacaatctgtccgtgctcatctgtcgtcagaccttctctcagcactttgccgtttgcatctgtcagattaaacttcgcaccttgcaggactttccgtttgtcaccttgatccaattttgtaagaacaacactgttcttgatgttaactgcagtcagggcagcctgatccggttttccgctgttctcagccttaatcgtaaaccgcacaggggttgttgacagcagataaccatccggcgcttttgtttcaacaaattgatagtttccgggcgccaaaccgccggcgtcaattttgccgccttcttttgtcatcagatcttctcttacggtttttccatcactgtcaatgattttaaatactgcaccgtctaaaacgtttccgtcttgatccttcttaaccagctggacagagcctttatagttgacaaaggtgccggtctcagacggcttcggctttccttccgctgtttctgagatggtaaactcttttttctccgtatttaacacataaccgtcaggcgctttcgtttcaatgaatgcgtaatgaccgggtgcaaggccggatgtttctacttttccgtctttatctgaaaccagatcgtcctgaaccgtttttccatcacggtcgacgattttgaagactgcaccttcaaggtttcggccttccgcatcttccttcgtcagccggacagagcctttatagttgacggccgttcctgcgtcagttgactccggctttccttccgctgtttctgagatggtaaactccactttcttcgtatttaacacatagccgtcaggcgctttcgtttcgatgaaggcgtaatgacccggggcaaggccggatgtttctacttttccgtccttatctgaaaccagatcgtcctgaactatttttccatcactatcgacgattttgaaaactgcaccttcaaggtttcggccttccgcatcttccttcgtcagcaacacagagcctttatagttgacggccgttcctgcgtcagttgactccggctttccttccgctgtttctgagatggtaaactccactttctccgtatttaacacatagccgtcaggcgctttcgtttcgatgaaggcgtaatgacccggggcaaggccggatgtttctacttttccgtccttatctgaaaccagatcgtcctgaactatttttccatcactatcgacgattttgaaaactgcgccttcaaggttcccgccgtctgcatctttcttcgttaaagcggcttttcctttataattcaccattgatcccaattcaacatcaggtacttgattcttttcgttctttgcgattgagaagtgaatggcttttgtgtttacgataaaccctgatggggctttcgtctccatcagccggtagtatccggcgggcaaaccgttgatctcaactttcccatttttatcgctttcaatattattttttatcagagtataggtaccgtcgcttgattttttctcaagcttaaatacagcaccggccaaaggattattgttttcgtcttttttgataagcgtcaccttatttttttgatttatgactttatagagtgctcctgctgcggaggatttgccgtcaatcgtaacggagaccccgtttacataagcatcgctgatggtgtagccgtccggcgcttttatttctttcagtacataggttccgtaacggatattcccaaacgtaagtttaccggcatcgtctgttgtgcccgtacgcagcagctgcttgccgtctttagaccataattgaaagtctgctcctgaaagagatgttccgtctgatcctgttttagatatcgtcaggcttcccttctcccctgaccctgagccgccgccgcttgaaatagcgacaaacactgagctgttgttctcttgggtctgctcctcaacattcgtccctgatatcgacactttgttgttgacctgaccgctgctgccggaaatattaatgagagaacgatattgtatgacatacgcacggtcgatttgtttatagccgcctgtaaaggtaagggcaaatgattgttcaccggtggcattgtcagttttcatatctaatttatagtccttatctttctcaagctgcacatcacccggaataagatttccgctgctgtctttcataacgccgttctcattatattttgcttgatatactttaaaagaatcttcatctattatttgattctcatccggtgtgtctttgacttttacgtcatccagtgtcgattggctggcattgacattgatgttccaatcgatattgtttccgttctgtttgccgcctttagaaatcaggtttcctccgtttgcgacggaaactgaacccgtcagcgttcggtctgcatggtcattattaaagtactctgctttgtttgtgtattgattctgtttaatgacctggccttttaatgacgttttaaattcaatcaggtatggtacagcgtcatctgttttgagatgtacggttaacgtatttttgttgccgtctgacggctcttctatttcatattttgaaggatccagcgcctctccttcagtgatggagccgtttttgctgatggtatacgttttaacagcaaccgacccatgcaaaaattgctgaccatctgtgatcgtatcttttatataaggatgttttgaaggttcgccattgtaattgatgccgactttccatgtgatttcttttgaaacggcgttgtatgagccgtttttgaatccgttatgggacgtctgattgttcggtgtgaagccgctcgattccttatttgtgcgtttgttgccgtttttatcggtccatgtcgactccgccgtatttttaatcgtttcgtttgaaaagtcagcgttgaattttgtcttatacgtgatcttaaactgactgtttgtttctgcgtagtccccgatcaatgctattgtaaagccttgatttccgggtttttttgttaatgtataatccgttccttctttcagcgttttgttttcagtcgtgtcttgcatgttaaatgaatcgtcaatgagcgccaggcctccgctggtgaattgatcatccagcgtccagtctttcattgtgtaaccgtttttgttaactgtgattgtccaatcaaccgtcttcttctcatagtctgcgtttgaataatgtttgatcagattctgctgaatggcggttcccggagtttcctttgagtcccccgtatctgtcattgctgtattggtgtatttgacaggactgtcaataatgaccccatcgttgacttgagattgataaatgatcttatatgctcctgtgacagtttgcttgaattttatttcaaagccgttcccgttatcagtcagcgtataatcatcaccctcttttaatggggcgccctcttgttcgctgccgttctggctgaatgtaatcggaaggactttcaatgatccgggaactagatgcagatcgtctgatccgaacgtatccttaatgccggctttggattgatcaatctttttctcaccgtagttgtacataacagcccagctgaacgtttgggtttctcctttataacctgtcgaagatttttctatcatttttccgtaacccgctgttacggaagcttccgcagaaatcggctccgcattgtctccgctgaatgccgccttgtttgtcagcgtgatgtttccgcctttacccggctttgcctcatctttaatttccgtgtcatatatgagccggtaggctgaatcaattgtcccggcgaaggtgacattaccgttttcgccaacggtataacctgaagttatctcatttccctgactcaccgagccgtcaatattcacatcaagttcatacactttcacagagcggaaagtcaattcgtccggaaggctttcagtcaatttcgcatttttaacttcttcttcctttttattaaggtcaaccgtccacgttacctttccgggattaatgcctttatccaatgaccctgatttctcaatggttttattgacattcggtttaaaataaaccgttacgtccggcgtatcagagttaaccggaaacttaatcttttgtgtggttgatccttttatttctttctgattgaattgggtgtttacatacaatgaccccttgacgttagaatcttcttttacctcgccgttaaacgtcatgatgacatggccgctcgtattaatggaaaaagttccgtacgtactatcgccgtcggtcaatggctggttcgtaatgtcattatgcataataaattctttaggcaggtcaaattcatatcgatcaccgtcgtttattgttttccccagctcattcggaatcgcccattggatggtgatattcgccggagagttcgtattcgcagggttgtttttgtcatatggttttcctttttcatccgtcaatttcacatcagttaaaatattttgcgtaatccggtttccgcctgattgaaggcttttagcggcagatttgcttgtaatcaccatttttgattgactgcgtttagcagaaggttttgatttcgttgcctgttctgctttatccccgccgtctgcagatgctgattttttctctgtcttatcctgaggttcagcaggtgttgaagaggtgtttttttctgtatcggaatccgttgttccgtctttcttcacaggtattaacacttgctgggtcttgccggcatccagttgaaaaagagcttttgccattttcgtctcatctgttatgtcgggagtaaacttcgccgacagtgtaatggagcctttggcatccccggcatccgcttcagcatcgttcactttcacttccagcgtgcttctgtttgcttcagctttatatataccgatcacccgatcagctgatttcagctcaccttcggcatcattatctaatgtaaaactttccggaatctttacggtgatattccggtcacttgcatcttctttgtgttttagtgaccattcgtatgtcagtgtcactttatctcccggtgttaaagccggttcaccggcttttgatccgtcaacggtctgctgtctgccgtctttgactgcaactgaatcaaagaacccgctctcgctatgttgtgatccggaagcggctgcgatcggagtaaagctgacaacttggctgaagatgaaaaacagcgtgaagcatgaaatcaatgccgccctcagccttttgctttttttcgggctgaacgaaaagttcctcactcccaatgtcttattcctccccttttatatagacttacgttcgaacaagccggtaagcatgggattctccttatccgaaccaaactacattgtatgaaatcggcctatacaaattctgtacatgggatcatttcagaaatagcgcacaaaaaaagaccggcatcagccggtccggtcattcaatcgtcaattgattttatcttttaattgtttatatcgttcgtattcctttatcgcctcttctacctttcccagtttattaaataactgcagtttgtattgtataattttatcgtcaccgggctctattttctcaacctgcaggcaaacgtccatcgcttgacgatcgttcttctcttggatgagaaaaccaatcagttcgtacgctttgctgagccacagatgggcaagacgcgctttttccggctctgcccacagatagccattctccatgagataatggttctcatatgacatgaccatgttcatgtgccgggttagtgcagctgcgctgagcggaggagcctctttgaatgttttttcccattcaactgtatcaatctttaccccggaaagccggagaatgtatcctatatcagtattttctattgattggctgaagggcagcttaccgattaatttccgtatctgatatattgtcgagtagagctgggtgcttgcttttgatatatcataagcaggccaaaacatctccattagcatgtctttactgaccgtgcgcccttgattaagaagtaaaaatgcatacagttcacgggctttggatgttctccacttgactgttatgtatgttttgacaccatttaccgattgataaaagtccaggttcccaaaacattgtataacataatccgtcccggtattcccgtccgccgacctgagttttttattcattcggatccgctcaacagttgtcagcagccgggcattgtcaaccggttttaatagataatcgacagcattcaattcaaacgctttgatcgcgaattcattataagcggtgataaaaataacttggatattttcattgacctcctgaatcgattcagcaagctcaataccgtttatcccgggcatttcaatgtcaagaaacaccgcatcagctgctgaaagttccgaatgctccagaacttccgccggatcttgaaacgttataatagattgaaaggcgtttgtccgctcaagcatacgattaaaatgaagcaatgccagttcctcatcatccacaattaacgctttcaaaccgcatcccacccgtcaatatagatatatctgaaaataatttcaattataccatgcccaatgccctatatagttggattctttttctttctcttgttgtattataacgtttgtgattacaatatttatacattaaataggataatagaatgcccctgaatgggataaaggagtaatgatgtgaaagaaaaatttatttcgattacgattatttgcggctatgctgctttctttatgatttttatggccatggatcatttttcaggatcatccctccctcaagcggaacagggcgtgatcaatctggaaaattgggattttcaaaaggatggaaatgtccagctgaacgggaaatggattctatatccaaatcagatgctgtcaccgcaggcgcttcattcagcaaaaggaaaaaatcccgtactcgttgatgtccctgtcaatgtgaagctgttcggaaaaacggccgacgtggattacggaacgtacaaactgacaatccgatcaaatgaagacaatcaggttttggggatcagcacatcttatatctacagttcaaaccgcctttatcttaatggaaaagtaatcggacagagcggcaatccttcagaaaaagctgattttaaggcgcagaacaaaccgtacagcagctttttcaggcttcgcaagggtgacaatgaacttgtcctgcatttttcgaatttcggaaaagttcccggctgggggatcgcaaaaccgataacgtttgggactcaagaacaaattatacgcgagaatcaaatttccttttttaatgattccattatgattacggcttttttcattaccggtttatattttctcggcttttttctgcaacggacaaaggataaacatttattgttcttttccgtgatgtgtctgcttttttcagccattattcttatgatcgggaaagaaagaattatctttctcctctttccgtctatttcattttcattgctgaattccttgcgtatcatctcaaccgtgcttgtcagcatggcggtttttctttatctcttttatgcatacagagaaattgtttcaaaaacgacgatcaccattttaaccgctttatccgggatcatcttgatcactgattttatgtccggaagtttcattgatcacctctcatacattttacattctgtgctggccgttacgactctgttttatattacatatatttttacgattgccgccataagaaaaataaaaggaagcacgtaccttacactcgcatccgtctcgatgagcgcttttgtgattcttacgaccatttcagcttacagcggcaaaacagctttttcttttaattcgatctattcattgccgacagtcatcgctttattggcggtggttctcctgatggcgcagcaattcgccggagctttccgggacaatgaagtcctctcacggaaattagtcaaaatggaccaactgaaagatgaatttatcgccaaaacttcacacgaattcaagacgccgctgaacagcattattaatatatgccaaacccttgtagccggcagaaaaaagaagacgatagaggaagagaaagaaaatatgcagctgatcatccgtatgggctacagactttccgatctcgtaaatgatattcttgatttggaaaaaatgaagcaggggatgctgcagattcgtccggttcccgtcgatgtgcatgccgtcatatgcagtgagatgaacttctaccggcttttatccaaacataaaaaactcgcgattcttaatcatgtgccggacgatctccctttggtgcttgcagatgaaaaccgattccggcaaatcttaaccaatcttattgaaaatgcaatcaagtacacatccgaggggaacattattctttccgccgcaaacctgaatgacaaaatgattcaaataaccgtgaccgattccggcagcggcattcctgaggctgatcttgaaaccatttttgattcttttcagcaagcgggagggaaggaagaagatggaacgggtttaggtttaagtattgtgaaacagctcgtcaagctccaaaacggggacatctgggcggagtcagcggcggcgcaaggatcagcctttcattttacgttacccgccgctcaaattgtttctttaccggaagcaaagaccgaacttcctaaatcacagcccggacagagaataccggatatttcgttggtcacgccttatcactcagagaaaatcgatgctccgacgattctgattgtcgacgataatatcgagagtttgaaaattttaattgatatgctggaaggtgttccttataacgtaatcgcagtaaaaagcggaaaagaggcgcttcaagctgtctcttcctcgaagcttgacttggtcatattagacttgatgatgcctgacatgacgggttttgaagtctgcacaaacatccgcgaaaggttcagcatggtcgatctgccggttcttatcgttacggcagccattatcagccatgacaaatacaaggcgtttcatgccggagcaaacgacattttacaaaagccttatcattactctgaattcaccgcgcgtattaaaaatttaattttaatgaagcatacggctcaccaagccacaaatttagaaatggcatttcttcagtcgcagattaagcctcattttctttacaatgtattaaatacgattatcgcgctcagccatttggatattgaaaaagcaagggaaaccactgctgcatttacaaactatttaaggatgagttttgattttcaaaacacttcggacatcagctcattcagaaacgaactttctatcattacgtcatatctttctatagaaaaaacacgcttcggcaaacggcttgatatcctttttgatattgaacaggacattgacttcccccttccgcctttaatgatacagccattggtggaaaacgccgttcatcacgggatcagtaagaaaagaggcggcggacggataaagctgacagcgaaaaaacaaggcgaaaacacgtatcttatcaaagtggaggataatggaaccggcatcatgccggacatacagaaagatattttgtcttctgatgttaatcgcagtgtcggcctgaaaaatatcaatcggcggctgaagcatttttgcggaagcgaattgacgatcaccagcaccccggatgagggcaccgctgtttcgatgatgattcacactcccggcacaacggatgattcgaactcactgaaaacgtcttcattaagatactgattaacttcaaaaggcatgtaaatacttctgccgactgtcgggaaattcccgtcagcctttacagaaagacgtaaaaacaaaaaagcttgaagaaaaaatgatatcttctccaagcttagcttagatgatccgcaccagtctggccgttctcacttaagaaatcgtaacccccgcgcttgcatatcccgccactgtattaataagcgaaaggcctgtcgcagtggcagagaataccattaacagccgggtttgaggagttaccgcaatgttcagccctgtcgtgattccgttgctgatgctgccgattgacaatacgccggtgaggggaggagctaaagtgacggatgctccggggatcggcgtgaacgtattgttcggcacagtagaactgtatagttgtgcggttatcgtaacagtcgagccgacaagcgacaatgctgcggttgtactgaaataggcggcaattgatgtaatggttccgcttctcggagcagaaaaagcaaagttcagcagagttcctccagccccggtaagatcaattgcacctccccctccgacattgacgcccgtcacagaattgccgaacccgacaaggctcaccgttccgattaatccgccggcaatggtcgtcacggcagtgggaagacctgaagcgtaaggaatgatcgcgcctgctccggtgatcccggtggcgcctgttgctccagtagcgcctgttactccggttactccggtgatcccggtggcgcctgttgctccagtagccccggttgctccggttgctcccgttactccggtcgatccggttaccccagttactccagtcgctccggtgatcccagttactccagtcgctccggtgatcccagttgcacctgttattcctgtcgctcctgttactccggtagcgcctgttaccccggtagctcccgttattcctgtcgctcctgttactcccgttactcccgttactcctgttactcctgttactcccgttactccggtcgatccggttaccccagttactccagtcgctccggtgatcccagtggctcctgtagcgccagtatccccggttactccggttgcgcctgttactccggtcactccggttaccccagttactccagtagccccggttgcccccgttactccagtcgctccggttgcccccgttactccagtcgctccggttaccccggtggctcccgttactcctgtcgctcctgttatcccagtggctccagttatcccagtggctccagtagccccggtggctcctgttactccggttaccccagttactccggtagctccggtgatcccagtggctcccgttactccaatcgctccggttacgcctgttaccccggtggctcctgttattcctgtcgctcccgttactccggtcgtgcccgttatcccggtagctccagtatccccggttactccagtggctcccgttactccaatcgctccggttacgcctgttaccccggtggctcctgttattcctgtcgctcccgttactcctgtcgctccggttaccccggtagcgcctgttatcccggtggctcccgttactcccgtggcgccgggatctccagtgactccagtggcaccggttaccccagtcgctccggtattcccggtcgagcccgttgctccggtcagtcctgttgctccagtgaaccccgttgctccagtcagccctgttgctccagtgaaccccgttgctccagtcagccctgttgctccagtgaaccccgttgctccagtcagccctgttgctccggtcagtcctgttgctccggtcagtcctgttgctccggtcagtcctgttgctccggtgcaccccgttgctccggtgaatcctcttacgtgaaaatgatttggatgacagcatggacaccatctttcatgacagcaagggggttcgcaacagaatccttcacagcaatgtgcccgattttgataactgcgcctttgatttcttcttttatgttgaaaatgacagcaacactcattacaatttcggcagtcgtaatcccaagaatcgtatctgttataccaagtatctccttttctcattacaccacctctattttcataatatttccacagagaaaaaaggtgtggcaaaaccccacttctattgggcaatttttcaaatgttcgttaagactgcatcatgcacagcattttacagaaaaaagacctaactgtgcataagtcaggtctttcatctttaaaatatcagtctgctgttgtattaggttgtcggaaaacttatgctgttaaaatcgatattgagtgcagttgctgtcgttaaattattagcagttgtgaaaataaccctgagctggtaagtgttcgttcctgcggtcggcgcagtatccactgttgtatcagcaatcgaaaaactatccgtagctgcgagagtactggttcgcgacagagttcttgtatgaatttgcactgctcccctatataatctcacttcaaaaacaaagtttgaattcgctgcagttgttaacgcggcactgagtgcataatccagctttacattctgcaaagcattaactgggattgccagcgtagcaacgggaacttctgtatttaacggcggataaacagtgagcggcccgttggttcttgtgaagagcaaggttggtgtactgcctgtggcgccggttggtccggttgggcccgttactccagttgggccagtcaccccggttactccggttgatcccgttactcctgttactcccgttgctcctgttactccggttgctcccgttactcccgttactccggttgctcctgttactcccgttactccggttgctcctgttactcccgttgctccagttgctccagttgctcctgtcacacccgttgctccagtcacacccgttggaccggttgggcctgttactccggttgcacccgttactcctgttactccagttactcctgttactccagttgctccagtggctcctgttgctccagtcacacccgttgctccagttacacccgttgctccagttacacccgttgctccagttacacccgttgctccagttacacccgttgctccagttacacccgttgctccagttacacccgttgctccagttacacccgttgctccagttacacccgttgctccagttacacccgttgctccagttacacccgttgctccagttacacccgttgctccagtcacacccgttggaccggttgggcctgttactcccgttgctccagttagtcctgttacacctgttggacccgtttctccggttgaacctgttactcctgttgcgccagtcgctccggttatccccgttgccccagtcactccagtggctcctgttgatcccgttactcctgtggctcctgttggacccgtgattcctgttgggccagtttctccagtggcccctgttactcctgttggacccgtttctccggttgaacctgttactcctgttgcgccagtcgctccggttatccccgttgccccagtcactccagtggctcctgttgatcccgttactcctgtggctccagtcacacccgttgctccagtcacacccgttgaaccggtttctccggttgagccagtaacccctgttgatccagtcacaccggttacaccagttgagcccgttgctccggtttctcctgttggtccagtcacaccggttgggcccgtcgcgcctgttgctccggttatccccgttgctccagtcactcctgttgcaccggtttctcccgttgtcccagttaccccggttggaccggtcgctccagttacccccgttgccccagttgctccggttgggccagttgctccggttgggccagtcgctccggtttctcctgtcgcccctgttactcctgtcgcccctgttactccggttgagcctgttgatccggttacaccagttaccccagtcgatcctgttgctcctgtggctccagtcacacccgttgaaccggtttctcctgttggtccagtcacaccggttgggcccgtcgcgcctgttgctcctgttatccccgttgctccagtcactccagttgcaccggtttctcccgttgtcccagttactccggttgatcccgtggttccggtttctcctgttacacctgttgggcctgttactcccgtcgctcctgtttcaccagttgggccggttgagccagttacaccggttattcctgttgaccctgttacaccggtcgctccggtttctcctattgaaccagttgatccggttgctccagttactcccgttgaaccagttgatccggttggaccggtcgctccagttacccccgttgccccagttgctcctgtcactcccgttgaaccagttgctcctgtcactcccgttgaaccagttgctcctgtcactcccgttgaaccagttgagcctgttgctccggttacaccagttaccccagtcgatcctgttgctccggtttctccagttattcccgttgcgccggtcgccccggatgcacccgttgcgccagttgagccggtttctcccgttgctccagtcacacccgttggaccggttgcgccagtcgatccagttgcaccggtttctcctgttgagccagtcgcgccagttggacccgttactccggttgcgccggttgagccagtcgcgccagttggacccgttactccggttgcgccggttgagccagttgagccagttgagccagttgagccagttgcaccggttgagccagttggtccgatttctccagttacccccgttgcccctgttgcgccggtttctcctgtcgctcctgttactccagttgagcccgtggttccggttgctcctgttgatcctgttaaacctgttggccctgttgcgccggttgggcctgtcgatcctgtggcgcctgtttctccagttaatcccgtcgcaccagttgagccggttactcccgttaccccagtcgctcctgtcgatcccgttacaccagttagacccgttactccggtggggccggttgctcccgttaccccagtcgctcctgtcgatcccgttacaccagttagacccgttactccggtggggccggttgctcccgttaccccagtcgctcctgtcgatcccgttacaccagttagacccgttactccggtggctcctgttgctccagtcactccggttggtcccgttgctcctgttaaaccagttgaacctgttcccccggttgcgcctgtttctccagttattcccgtcgcaccagttgagccggttgagccggctgctcctgtcggtccggttgggcccgttcccccggttacacccgttaccccagtcgctccggttatccccgttgtcccagtcactcctgttggacccgttacacccgttaggcctgttgtacctgttactccagttgacccggttgctcctgttgatcccgttactccggttgcacctgttgctccggttgggccagttgatccggttgctccggtttctccagttattcccgttgcaccggttgagccggtttctcccgttgagccagtcggtccggttattcctgttgacccagttacaccggtcgctccagttactccagttgagcccgtggctccggtttctcctgttgagccagtaacccctgttggtccagtcacaccggttgggctcgtcgcacctgttgctcctgttatccccgttgctccagtcactccagttgcaccggtttctcccgttgtcccagttactccggtttctcctgttacacctgttgggccggttggaccggttggaccggtcgatccggttattccagttgaaccagttactcccgtggctccggttggtcccgtttctcccgttgcaccggttactcctgttgtcccagttaccccagtcgctcctgtcgatcccgttgcaccggttgaacctgttactcctgttgatccggttactcccgtcaccccggttgttcctgttgaaccagtttctccggttgaacccgttgctccgattggaccggtctctccagttacccccgttgcccctgttgggccggttactccagtagctccggtatccccggtcgagccagtttccccggttgctccagttactccagttgcaccggtttctcccgttggacctgttactccggttgagccggttatccccgtcgcaccggtggctcctgttgctccagtcactccggttggtcccgttgctcctgttaaaccagttgaacctgttcccccggttgcgcctgtttctccagttattcccgtcgcaccagttgagccggttgagccggctgctcctgtcggtccggttgggcccgttcccccagttacacccgttgcccctgttgcgccggttgggccgcttggtccggttgggccggtcgatcccgttacccctgttactccggtcgctcctgttactcccgttacaccggttgggccggttgagccagttactcctgttgggccagtttctcccgttgcaccggttgatcctgttactcccgttacacccgtttcaccagttgggcctgttacccccgttgctccggttgggccggttgttcccgttcccccggttataccagttaccccagtcgctcccgttgcaccggtttctccggttgagcctggcgatccagttggaccgatctctcccgtgggtccagttgatcctgctgcaccagtaactccagttgaacctgtcgacccggttggaccggttggaccggttgatcccgttgctcctgttactcccgttgctcctgttgaaccagttgaacctgttcccccggttgcgccggtttctcctgtcggtccggttgggcccgttcccccagttacacccgttgcccctgttactccggtcgctcctgttactcccgttacaccggttgggccggttgagccagttactcctgttgggccagtttctcccgttgcaccggttgatcctgttactcctgttgatccggttactcccgtcgccccggtttctccggttgaaccagttgggcctgttacaccagtcgctccggtttctcctgttgcaccagttactccagtagctccagttactccagtagctccagtatccccggtcgagccagttgggccggtttctcctgtcgaccctgttcccccggttggacctgtcgaccctgttcccccggttggacctgtcgaccctgttcccccggttggacctgtcgaccctgttcccccggttggacctgttattccggttgggccggttgggccggttgatcccgttgctcctgttactccagttgagcctgatgagccagtcgcgcctgtttctcctgttactcccgttgcaccggttgcaccggtttctcccgttgagcccgtcggtccggttgaacccgttgcccctgttattccggttgaacctgtagatccagttggaccggtctctccagttgcgccgatttctccagttacacccattgcccctgttgggccggttgggccggttgagcctgtagatcccgttacccctgttactccggtcgctcccgttacacccgttgcccctgttgggccggttactccagtagctcccgttgcaccggtttctccggttgagcctggcgatcccgttggaccgatctctcccgtgggtccagttgatcctgctgcaccagtaactccagttgaacctgtcgaccctgttggcccggttggaccggttgatcccgttgctcctgttgaaccagttgaacctgttcccccggttgcgccggtttctccagttaatcccgtcgcaccagttgagccggttgatcctgtcggtccggttggtcccgttaccccggtcgatccggttatccccgttgtcccagttactcctgttggacccgttacacccgttaggcctgttgtacctgttactccagttgacccggttgctcctgttgatcccgttactccggttgggccggttgctcctgttgagccagtcgcgcctgttgatccggttgaacctgtcactcccgttgaaccagttgagcctgttgatccggttacaccagttaacccagtcgatcctgttgctccggtttctcccgttgtcccagttactccagttgggcccgtttctcccgttgatcctgttactccagttgatcccgttgcgccagtcgatccggttactcccgtcgctccagtttctcctgttgaaccagttacaccagttgcaccggtttctcctgttgaaccagttacaccagttgagccggtttctccggttgagcctgttgcaccagtcactcctgttgggccagtttctccggttgcgccagtaactcctattggaccggttgagccggttggaccggttgagccagtcgcgcctgtttcccccgttggacctgttactccggttgagccggttatccccgtcgccccggttgctcctgtcgatcccgtgaccccgatcgggccagtcacaccagtttctccggttgaacctgttggtcccgttcccccagttacacccgttgcccctgttgggccggttgggccggttgggcctgtcgatcccgttacccctgttactccggtcgctcctgttactcccgttacaccggttgagccagttactcctgttgaaccagtttctcccgttgcaccggttgatcctgttaccccagtcgagcctgtcgatcccgttgcaccggttaatcctgttactcctgttgatccggttactcccgtcgccccggtttctccggtttcaccagttgggccggttgttcccgttatgccagtcgagcctgttgctcctgttactccagttggaccggttgttcctgttgggcctgttgctccagttactcccgttgaaccagttgctccggttggaccggtttctcctgtcgcccctgttactccggttgggccggtttctcctgtcgatccagttggacctgttataccggtcgcgccggttatccccgttgctccggatgggcctgttgctcctgttatccccgttgctccagttgggccggttgttcccgttcccccagttacacccgttaccccagtcgctccggttgaaccggttgaaccagttgctcccgttactccagtcactccggttgagcccgtggttccggtcgctcctgttacaccagtcgagccggttgctccagttactcctgtcggaccagttactccgtttggaccggttacacccgtcgctcctcttgccccggttgcaccagttactcccgtcgctcctcttgcgccggtcactcctgttgggcccgtcactccagtgggacctgtaattcctgttacgccaggttcacccccggtttgcgccaatgaaacatcgtctattaaaaccgtgccggaagaaactttacttaatacaatgacggcagaggccgcgccagaaggcacactgcttgttttatagatttcagaccatgtgtgaaagagcacgttcggcaaatttccgggtgtaatattttcttgaatggaactgatttgttcacctgctgcgctgacatagatgatctggagagtgacttggggacttggatcatttccgagcgttgcgagtgatacgaatagagtcactgacttggctgaaatgggaacgatttgactgaggtaagcatatggctgagctccaataaattgcgcagaatatctccctgaatgtgcaaacaaactgttaatctgggtatttgccgaactccaccccgctaatgtgccggtttcaaagcttccgtttataatcggattattcattcaatctttttccctctccttcccgttgttgaccgtcttacttattaagacagcatattaatacgggctgtgttttgacaacctaaataaaaaaggtgatttcttttcatcaccttaatccgatccttgaatggggaatcccgtcgcaatgagggagcggtttgctgctgcgacttgtgttacgtagttcgaagaaaggacggataaatagagctgatacgcggctgtttcatccgccttcatttcgtcgatgtacgtaaaaggaattcctatgatttgtccgcctgaagaaaagaggttccgctcttgtctctgtgtttgtatcgttacgccatttctttgcagctcgacagctaagaccaatgagaaatgagacgcaagcggatctaattccacatttacttgtatgacggcatccgttttcaccaattgatctgtcggcgcagctatcactgcgcttaacacgtttatcggtgttccttctaacggaagcgtcattaggtctgctgtattttgaaaagctaccgcaggaaccgctcccggcggcccctcaggccccgggggaccgggcggaccgggcggacccggcggacccgcctccccttgcggaccgcgggagccggcgggtcctcttttgccttcgggacctcgcagcccgggtacgcacaaggcagatcgattttcatttgaagacggaaaccgtttttccgtccctgtttccggactttcaagttcacatggtaattgttcataccggcgtttcatatgtctgctcatatatttgtaaggtttctgtttcaatatcatgtattgattacggccgctgctcataatatcaccccggcaatattctattcgcactgaagtcagcgtgtgcaggcccttcccattccttacagaaataaaaaaaaggcagacctgagtctgccttttttcttctaccataaccctaatactttccaccataatccgccgatcacaagccatgtcacaatatggacgattgacaggataaagccgatggaccaccatttgctttgcgagatataacccgctccgaaaaagaccggagccgctcctgagccgtaatgcgtcgtcgaaccgaaaaggttgctgaaaaacgccaggctgagcgccgccaacagcggcggagcgcctgccgccacgatgacggcgagaaatgccgcatacatggcgctgatatgcgcggttgcgctcgcaaagaagtaatgcgtgtaataatacacgacaatcagaatcataaatgccacaatccatgaaaaaccggaaacagatgatttcatcatattgctgaaccaagacaccatgccgagctcattcaggaaattcgccagcatcacaagcgccgcgaaccaagtcagcgtatcccatgcaccttgttcttttttgatgtcctcccatgttaatacctgtgacaaaagcaaaacggataatccgatcagggccgtcgtcgttgcgtcgatatttaagcttcctccgaaaatccacagcgcaagcaccaataaaaagacgataaccatggagagttcggattttttaaacggacccatttctttcaatttttccgttgcgattttagccgcgtccggtgtttctttaatttccggcggatacagcttataaatgacgagcggcgtaatgattaagctcgccaatcccggtacaatggccgcgattgcccagcttgtccatgtgatgtccacccctgcgacatcgtgggccagcttggcgatcagcggattcgccgccattgccgtcaaaaacatcgcagacgtaatcaagtttccttgaaaaccggtttttaataagaaagcgccgattttccgctctgttccgtctgccggcgttgatccgaaagtttcggataatgatctgataataggaaaaataatgccgcccgcccgtgccgtgttgctcggaatggcaggtgataaaattaaatcactgaacagcagtgaataagaaaggccgagtgttttcttcccgaaccgttgtacgaatacgtaagaaatcctggcgccaagcccggttttgataaatccccgggaaataaaaaaggcgatgacaatcagccagattgtcttgtttccaaatccgcttaacgtattttcaatagatagcgttcccgttaacgcggtgactgccaatgcaaaaattgcaattgcgcccattggcaagggcttggagataaagccgataattgttgcgacaaaaatagcgaacaaatgccatgctttaggttcaagtccggacggcgcgggaataaaccaaatgattaatcccacagcaacagtaataagcaaaggaatgatttttactgcctgctgtttttttgcgtctttttctgaagccattacaggtctcctcctattttgttgtcttccatccccctatcccattttactacttaactaagttaataaacgtttttgttaattaaaaaacacaaaggaatattttcctttgtgcttcttgtttattattttaatatacccgacccggctttagatataacatctgattttacatttgatgatgagccgatggaaccgtgcaatgacggtgtccagccgacggactgacttaatccgttggcagctgacgcgttaattgcggcgccgtttaaaagagtgccgtcttcatgaagtgcttttccgccgctgaagacgctgatgactttatcagcagccagtcccggcacttcaaagacattattctgggcatatatttttgacgcgtggcctgcgccccacgcatagctgaacgggtatgcggcgcttttagagcctgcgtaaaaattattataaatatgaacctgcccgtaccggacccgcggtgcgcgctggacgatgttctggtaatagttatggtgaatggtcaccttcagttttccttcatccgacgtcttgctgtcgctgtttccgatgacggagcctttgtcatggtcatgatatttattataggacaatgtaatataattcgccccgttggctatatccgtctggccgtcatggtgctgatattttctcccgtaatagtagggaaaaccgctgtcgggattcgatccgtcattaaaggtgcaatgatcgatccagatatgcgtcgcgccgttaatggtgatattgtcatattccgagttccagttgccgctgctgccgtccgtcgggtcccattgcggaaaatagtcgtaagcgtcttgaaattcaatgttgcggatgatgacattgtcgacgccgttctttatattaaaacttccgcctgtcactttggcatttgaacccgaaccgatgatcgtcgtatttgaaggaatgtcaatcacgacccgtgctttctggtttttttgagatcgctgtctggcgtcttcctgggtgcctgacggcgcttttttcccccatttgtccgggtcgtacgccttcagataagcgttgagatcatatgccggatctttataatcattaaagccgagcgttttattccggtcgtccgtattcatattgattgtgccttgtatgtaaataatcttcggcgtgctgttggcgcttccccctaatgcagaaacgagctgctgtctgtttgatacggtgtagacattcgataaagaggctttcgcgccgccggttgtcccgccggaagcggctccccagccgtcatttgttcctaacgtctgccgtcccaggtcagcggcatagacgtccgcagggatcatacataaacaaaccgccagcataagtaacatttttttcatgaattgtgctcctcctgattctctgttccaatttattacaattggattgtatcaaatcagttgagaaacggcaccgaaaatgtacagcatgtgcctttcggttttattgcggaaaccgcaaaaaaatcccaagggaccgaaaaccccttgggatctgttcagcttacgcccatgattttactttttcgttatccgtgacaaacagaagaacttttccttcatctaagcgcttttcaaattgtgatgcttcctcttctgaaaagccgatttcgtgaattttgttgcggagctcgtcgccttttttattaaacatattgccgaccgcgtgtttaatgcccgtttctttcgctccgatggtattgacatcagtattatccgccagacggtccgttctgtcgtcatcatgtgaaagcacatatacgtcttcttttgcgacacccaattgctgaagctcttttacgtcctgcatcagtttttgatcatttgtatattctcttactaccggtttcattgataagtcctcccttttgtttttgtatattggatgtttacccgctcaaccaaaggtcaaacaaaagaaagagagttccgggaaaaaacgggcagattgtcggtggatattttccggcgggacatgttacagtagggaaagtaacttttatcagaaaaataaaaatcttcatgagccgattaagcagggaggtggttcctattcattacttttcaccggaacagcgatttaacgcttgggttgtcagtgatttagtgaagcaggtattccgccggcatacccgctgcccggatggaataaaagagcttacggcctttgctgaagatacttttcatattaatatcgatttcgttttctctatcattatcaatatcggtgatatcgaatccgttctgccgacagaaattgaaaataagctgggttcttatctgaccgcgcttcagcccgtgattacctctgacatgcttcattcttcaaaaacgaatgcctatgaatatttggaacatgagaaaaacaccgatgtgtaccggttattcttttaaatacgcatataagaaaagaagggccctggcccttctttttttgttgccggcggacggtttgattttgtattcgggaaatggttcgtgttacatttggaacaaccacttatcttgaaggaggattcagtatgccgaataatcagcagcagattcaattggcaagacgcccgaaaggcgttcccgtccatgacgatttccgctttgaaacgattgccgttcccgaaccgaaagacggcgaagtgcttgtgaaaacgagttatgtgtccgttgatccgtacatgcgcggacggatgcaggatacaaaatcatatgtagagccgttcgctttagatgaagccataacaggcggagtgattgccgaagttctgacagacggcgataagctgaaaaaaggagatgttgtgatcggaaatctcgcatggcaggaatattcagccgtcaatgagtccgccctccgcaagttggatacggatatcgcacccgcccaggcgtatctcggcattttagggatgaccggactgaccgcttacttcggcctgcttgatatcgggcgtccgaaaaaaggcgaaaccgtcgtcgtttcaggggctgcaggcgccgtcggctcaacggtcgggcagattgccaaaatcaaaggcgcgcgggttgtcggcatcgccggttctgacgaaaaaatcgcgtatcttaaagaggagcttcaatttgatgaagccattaattacaaaacggcggatgatattcaaaaagcgcttgaacaggcatgccctgacggcgtcgatgtctattttgacaatgtcggcggaccgatttcagatgcggtgataaacctgctgaatgaattcgcccgcattccggtatgcggagcgatctcttcatataataccgaaagtgaagaggaagacatgggcccccgcgtccagccgaagctgatcaaaacaaaagcgctgatgcaggggttcatcgtcagtgattatgctgaccgcttttccgaaggcgcgaaacaattggccgaatggctcaaggacgggaagcttcattatgaagaaacgattacggaaggattcagccatattcctgacgcgttcctcggtttgtttaaaggagaaaacaaaggcaaacagatcatcaaagtcagtgatctaggttaacatgatgatgaaaaaaggagggctttgtcccctccttttctgctttttcgcatcagccgcgaagaatcaaagtaagaaagccgtcttcatcaggctccgtattttccaaagtgaatcccgctgcttgaaagcagactaaactgatttgattgtctttttagatgcttgccgcccattcccgcacgccggtaaacccaggatcagtcagcagtttttgcaagatctgttttccgtacccttgaagctggtacaaaggattgacgatcaatccgatatacgcccgttcctccacaaactctatagagaccattcctgccggaagctgcccgtcatatgccataatgacagtatcgtcttcatctttactcaatcgtgcataccatgcatttagtggccgcatcgcatccattctccgtctgatattatcgttcttaaaccagtgttcaagtattttcagctcacgtaccttcaatatttgaaatcggtctattgaaaccatcttcccgcccccgcctgaaccttttctattatttcacaataaaaaagaagggcttcccgccctccgtttcttatttctcagataattttccgcctgaataaacggcctctttcagctcaattccgagtgatttggccatttttttcaatttggattcttccatcggcgtgacaaggctgagtacggttccttctttaccggcccgccccgtccggccggatctgtggatatatccgtcttcattcgggatgtctgcgtgaatgacgtacggaagatcatcgatatcaagtccgcgcgccgctatgtcagtcgccagaagcagcggaaattctcccccttcaaacgctgataatatctttgcccgctccatttttttcgcttctccgtgcaggatgccgagatccacgtgatgataggcgagtttttccgcatagacgcttaaatttccgatatctctgacaaacacgagcgcctgcatgccgttcagccgtgacagcttttgcaatagcttcactttatcccgctgatcgcagacgagatattgatgcgtgacgcgcgctttttccgccgtattccgcgccactttcaaaacggccggttcatgtgcgatggcattcagcacctcttctgtctccggctgcagcgtagcggaaaagcttaaaagctgtcggtctttcagcgtcgttttaatgatttttttcatcgtttcgcggtgttcctttgtcacgagctgatccgcttcatcaagaacgatcgtcttgacttcatgcattttcagctttttcgcctgaatcaattcgagcaccctgcccggtgtgcctgcaatgatatgcggtttatttttgagcttctccacctgctttttcacgtttgccccgccgatcaaagacaaagcgcgaagatcggagccttttttccactcctgaatcacttgaaaaatctgcatcacaagctcgcgggacggcgctaaaatgatcacttgcggatgtttctgttccgggttgatccgctccagaaccggaagcgtgtacgccaatgtttttcccgttcccgtcggggattcggcaatgacgtctttcccttccatgatcacctgagcggctttttcctgaataacggtcggctcctgaaagcctgacgcctcccagttttcggcgataaatggttgtgtatgctgtaaaaatggccatgtttgggtcatgtcgttctcctcaattcttaaaatctactccatagtatctcaaatgcacgcggcaaacgcaattttctttttccttccaagccttttaacaaacggtctcctcctttataatcataaatgagaaagacacatgataaaaaaagcgtgtctgataacgatagaggtgtaatgatgagtattttatccgtaaaagatttaagccacggcttcggtgaccgtgcgctttttaacaatgtatcgttccgtcttttaaaaggggaacacgtcggcttaatcggagcaaacggcgaaggtaaatcaacgtttatgaatattattaccggaaagcttgagcctgatgagggtaaggttgaatgggcgaaaaacgtgcgtgtcggctatctcgatcagcataccgtgcttgaaaaaggaaaaacgatccgcgacgtgctgaaggatgcgttccattacttatttgcgatggaagaagaaatgaacgagatttacaacaaaatgggcgaagcggaccctgatgagcttgagcagctgcttgaagatgtcggtgtcattcaggacgccctgacaaacaatgatttctacgtgattgacagcaaagttgaagaaatcgcccgcggcctcggcctgcaggaagtcggcctagaccgcgacgtcactgacttaagcggcggacagcggacgaaagtgctgctcgccaaactgcttttggaaaagccggaaattcttctgttggacgaaccgacgaactaccttgatgaacagcatattgaatggctgaaacgctatttgcaggaatatgaaaatgcgttcatcttaatttctcacgacattccgtttttaaacagcgtaatcaatttgatttatcatgtggaaaaccaagagctgacgcgttatgtcggtgattatcatcagtttatggaagtctacgaagtgaaaaaacagcagctcgaagccgcctacaaaaaacagcagcaggaagtggctgagctgaaagatttcgtcgcccgcaacaaagcccgcgtcagcacgagaaatatggcgatgtcccgtcagaaaaagcttgataagatggatatgatcgaactggcggccgaaaaaccgaaaccggaattccatttcaagcctgcgagaacgtcaggcaagctcatttttgaaacgaaggacttagtcatcggttacgatactccgctgtcacgcccgctcaatctcagaatggagcgcggacagaaagtcgccctgtacggcgcaaacggcatcgggaaaacgacgctgttaaaaagcctgctcggtgaaatccagccgctggaaggcacggtggagcgcggcgagcatcaatacacgggctatttcgagcaggaagtgaaagaaaccaataacaatacgtgcatcgaagaagtgtggagcgaatttccttcctttacccaatacgaaatccgcgccgccctcgccaaatgcggcctgacgaccaaacacattgaaagccgcgtctccgttctcagcggaggagaaaaagcgaaggtcagactgtgcaagctgatcaattcagaaacaaacctgctcgtgcttgacgaaccgacaaaccacctggatgtcgatgcgaaagaagagctgaaacgcgcgctgaaagaatacaaaggctccattctgctgatttcccacgaacccgagttctacatggatatcgcgacggaaacatggaattgtgaatcttggacgacgaaagtgctgtaaacacaaaaaggaactcccgcccgtgcggaagttcctttttttaatgtccggcttttattccggcaagatgtttgcgtcccataagaagaacaagcatgccgacaaaaacgacaatcccgcctactgtatatggtgtgcttgcggtgaagtgttctgacagcattcccgcaatccacggagcgagcgcaccgccgataaagcggactgagctgtaggctgaagacgcgatggaacgttcaaccggcgcagcacccatcacagcggttgtcatgatcgtattcaccataccgaggacagcaccggcaacaacgatacatgtaatgatcaacgtctgatggtcagtccagacccccataataacgagaatggccgcaaaggcgataaagagaacgacgagcgaacgcactgtgcccagcgctttatgcacgagcggcgccgtaaagactgacgtaattgccagcagaaggccccagccgaagaagacgtatccgagaccgtgttcatctaaatccagaacgaacggagaataagcaagcaaaataaaaaatccaaagttgtataagaatgcagatactgccattgtcaaaaggcctttatatttgagcgccttcatcgcatcaaacacaccgacgcgtttcgccggtttcggcagcttcggcagcatgagtgaaatcgcgcaaagcgctataaacatcaggacagacactccgaagaacggagcgcgccatgaaaggctgcctagctctccgccggcaagcggcccgacagaaattcccagtccgagcgcggcctcatacagaataatagctttggcgctgccgccgacagatacaccgacgatgacggcaagcgcggttgaaataaagagagcattcccaagtccccagccgccgcgatagccgacaagctgagcgattgaacttgagcttccgccgagagcggcaaacacgatgataaaaataagtccgagaagcagcgtccattttgcgccgatccggcttgaaatcgcgccggagaaaaacatcataaaaccggtaacgagcaaataacttgtaaataacagagatacttcactaggtgaagcatgtaattgtgcggcgattgccggaagaattggatcgacaagaccgattcccataaaggaaatcacacaggcaaacgcaaccgcccaaacggctttcggctggctgaataagcctgttttctgttgtgatgatgtatccatttgaccagacctcctgttttatccattaaaagaaacgctatatccatagcgtttacagcaaaatcattcgattgattgaatggcgcggtcagctttttctttcattccgttaaggcgcgttttaaaatgctgaaatgtgctgatcttctcatcaatcatctcaagctggtggttcaaagcgtgctgaatctcttccagcttttctttccgttccttcggatccagtgacaacaagtacccctctttgtttaattccagctgacggctcatctccataaactgctgaagttcctgaagggaaaaaccgagcacttcttttgtgctggtgactttttcgagctcctccatatcatcttcagagtaaagccggacgccgccttctgtccgtttaggagcaggaatcaaaccaatctcctcgtaaaaacgaatggttcgttttgtcaatccgcttcgcttggcaacttgatcaatcttcatccattccaaggtgaatccccctcttgtcgtatctgtttctattatacaccatttgaaccttaacgtaaacgtaaactttttatgccggataaacttggcttggacggaacctttgtctttaaagcgccgggagacatctgtgtaagataaaaaaagccggtatgacccgccatcttctcgggggccgtaccggcttttcttaattctcaagttcttcaatcatcagtgacaattcggtccagcgttccatcgccgcttcaagctcttcagccgtttttgcctgttcggccatcagttcttgtatctttccgaaatcacttcccgcttcagcgatttccgcttccagacgctgatgcttttcttcaaggccggcgattttgtcttcgatgccgtcccattcgatctgatccttgtacgaaagctttttgcgctttttcttcggctcttcttccgcctttttctcttcggccggctgttttaccgccgtcttcttctcttttgcttgttccatgtattcactgtatgaaccttggaaacgggaaatgacaccgtgtccttcaaatacgatcaggcggtccacgacgcggtcaaggaaatagcggtcatgggatacggtgatgacgacgcccgggaactgttcgatataatcctcgagcacgcttaatgtttctgtgtccagatcattggtcggttcatctaaaaacagcacattcggctcctgcatcagtacattcagcaagtacagacggcgtttttccccgcctgacagctttctgatatatgtctgctgcatcggacgcgggaacagaaaacgctcaagcatttgttccgcggtgatgacatcgccttccgccgttttgacgatttcggccgtctcttttatatattcaatgactttcatatcgccgttcatttcgctgtgatcctgggtgtagtagccgatccggaccgtctgcccgatggtgatattgccgctgtcaggctgaattctgccggcgaggctgtttaaaagtgtcgttttcccgattccgttcggcccgatgatgccgattcgttccccagggatgacaagctcattaaactggctgatcagcgcttggccgttataggtaatggagacgttatcggcttcgattacttgttttccgagacggtgggaaccgatcgcgaaatcgagtgatccggagactgccggccctttttgctccttgagcgcctccgctctgtccactctcgctttttgtttcgtcgagcgcgctttcgctcctcttctgagccacgccaattcgcggcgcaggaggttttggcgttttgtttctttctgctctgccagcgcctcccgttcggcccgtttttccaggaatacttcatagtttcctttatacgtataaaggctgcctctctcaagctcgtaaattctgttcgtcaccctgttcagaaaatatctgtcgtgcgtgacaagcataacggcgcccggatattgcgataagtagccttccagccattcaatcgtttcattgtccaagtggtttgtcggttcatccaaaatgagcaggtcagccggctggatgacgtttttcgcaatcgcgacgcgctttctctggccgccggacagctcgctgacatccttcatcagatcggtgacgccaagtttggttaaaaccgttttggctaacgtattcgcctcccacgcatcattcgcgtccattcgggcctgcgcatcaagcaggtgtttctgacgctggtcattttccggttcttcattcagcgcctgaagcgctttttcgtactctctcatcgttctcatgacggctgatccgccggaataaatatgttcaagaacggtttgtccggccggaagctcagggtcctgatgcaagaactcaatatgcacgtttcctgaagccgtaatctcgccttcctccgttgattcaaggccggcaatggttttcagaagcgtagacttccccgttccgttcgggccgattaaaccgattctttcattctcttcaatatgaaaggagatatggtcgaataatgtcttatctccgtatgttttataaaggttttccgcttttatgatgctcatggttcctatcaatcctcacgtaagttcatgtgttcattttaaatcaggcgctgtaataaaactagtaaaaggacagacaaatttcttggaagagatcattttgtccgaagaatgtttccgcctctccttttatacactggaggggaagaggtgatgacatgatcagcgtcagtttgtgcgttatcgtgaaaaatgaagaggaagtgcttgcgggctgtcttgattccgtcaaagacattgcggatgaaattgtgattgctgatacgggctcgaccgaccggacgaaagaaatcgcggcccgttatacggataagatttatgattttgaatggatcgatcactttgccgccgcccgtaattttgtgttttcgaaagcggaaatggattatattctgtggctggacgccgacgatatgctgacggtaaaggaccgtgaaaagctgattgaactgaaggcgtcgctttcaaaagaggtggacgcggtatccatgtattatcacgtcggctttgatgatcggggagaggtcagcttcagataccgccgcaaccgactcgtcaagcgtgaaaaagggttccgctggatcggagccgtgcatgagtatcttgaggtatacggaaacatcatagaaaccgatattgccgtcacacaccggaaatccgaaaaaaagcactcgcctccctcggaccgcaacttgaagatttatgagagaatggcggaaaacagtgaatcgatgacaccgcgcgatttgttttacttcgcgaatgaattaaaggatcacggccagtatcagcgcgccatcacgtattatcaccattttctttccacaaaacagtgctggatcgaagacgagatcagaacgtgccaatatctatccgattgctacagggcggtcggccatgaagaggccgccatgacgtctctcttaaaatcatttctgatcgattgtccgcggccggagttctgctgcaggctcggcgactattttgcggagaaacggcaataccggcagggcgtgttttggtatgagctcgccctatccgccaaaagcagtgatgcaggctttacccagctcgaatattccacctggtacccccatctgcagctctgcgtctgccactggcagctcggcgacagagaaaaagcgaagattcataacgacaaagccgcctcctatcatccgtcacatccgagtgtcctgtataatcaaaacgtgctcggcacataacatcaaaaaaaagagctgccccgtatgaagggcagctcctttttgattacgctgtcggaattcctccgcttacactgtaaatttgggatgtcacatagcttgattcttctgaggccaaaaagacataaattcctgccagctccgccggctgtccggcacgctttaatggaacggccggtgtttccttgccgaatttcggaatgttttctccgggctgtcctcccgaaatctgcagcggtgtccagatcggccccggcgctaccgagttgactctgattcctttattcgccagctgctttcctaggccgacggtaaaaccgataatggcatgtttcgtcgcagcataatccaacagcatcgggcttggattataaccttctacggacgttgtcgtgataatagacgcgccttccggcagatacggaagcgcggctttgacgagccaatacagcgagaatacgttgacttcaaatgtttgatagatttgttctgtagtaagatcgctgatatcatccactgcctgctgtttgccggcgacaagagcgagcgtgtcaagaccgccaagctcttgatacgctttttccgccaattctccgcaaaacgcttcatcgcttaaatctcccggcagcagaacagcttttcttccctctttttcaattaacgctttcacttcttcggcatccggctgttcctcaggcagatagttaatggccacatccgccccttcccgggcataagcaatcgcggcggcccggccgatacctgaatcgccgccggtgacgagggcttttcttcccttcagcttgccggctcctttatagcttgtttcaccgcagtccggcacaggcttcatctctttctgcaaaccgggcggttcttgatattgttttggaaattcatcatgatcatatttcgtcagcgggttgtgcagatttgcatcagacatacaagactctcctttatcattggtgatgtattcgtatgtgtacccctgagcatgacggatcaaacgtgtaagtgcagtttccgattgataagggaaaacaaaaaaggagcccgtaagctcccttttttatgattctccgagcacgttttcagccattttcgctaaatgctgggcgcttcccgaaatctcctgcatcgtggcagaaatttgttctaccgccgccgcttgaccgtccgtgttctggttgatggattcaattgagtcctccagccctttcagcaggctgtgaatttttttcgtaatctggtcaatttggccgacattgtcttttgaatgagtggcaagcttgcggatctcatccgccaccacggaaaagcccttgccggattctcctgctctcgcggcttcaatggccgcattcaaaccgagcagattgctttgatccgagatgcccttgacagtaacggaaatgtcggcgatttctcccgcgctttcactgacttgtttcgcctgagcggaaatcccggtcatctgtgctgagaaaccgctgatggattctgagatatccgcgatcgccgaagcggtctgttccacgacggcggacaggctttcagcgacatcatgaagcttggctgatttttcaaggctcgtgccgagaccgacgccgccgatgacttttccgttttcatcgtgaagcggaatcgctctggcgatcagcggaaatccgaacagctctttcggcaccatgcttgtcttcttctgattcatgcggatcgcgtctgtaatgatgtcccctttttgcagcggatctcccggctttacattaagagaaaacgttttagccggaatattcacgattaatttttctgtatcataaattccgatggtgatgtcatcttggatcaggctgtttaaaaaaggcgcaactttgacaaaagcgtcaagcaggctgtgcgtttgctgctccgtctgtatactcatttctttcactccttcttaatatgggaattggcgtttttcatgctgaaccgaaatccatttcagcgtggtgaattcttcaaggctccattcgccgttcagcctgccgagacctgattgtttctcgccgccgaacgcaacgttcggttcatcattaatggtcgtatcgttgacgtgaatcatgccggtttcgatccgcttagcaaactcaacgccccgctccacgtttgccgtatgcacggctccgcttaaaccgaacggtgtcgcgtttgcgatgcttaccgcttcatcctccgtttcaaacggcatgatgcagacggccggtccgaacagctcctccttcgcgatgctcatctcaggtttcacatcttttaaaatgacaggctcagcgaccgttccgctgaatcggccggacagcaccggaaccgctccctcttctatcgctttttcgacagaccgtctcaggccttccgcctgtctctcattgattaaaggaccgataaccgtatcagggtccatcggatcgccgactttcagcgatgacactttcgcttcgtagagctctgtaaatttgtcataaacagatgtgtgaacgagcacgcggttcgccgacatacagatctggccttgatgcgtaaaccggctgaatacggccgcattgacggcgtattcaagatcagcatcctcaagcacgatcagcgcgctgtttccgccaagctccaacagcggttttttaaagtgtttgaccgcaagctgtccgatatagctgcccactccggttgagcctgtaaatgagattatccgcggcacgggatgctcaacaaagctgtcgccgatctccccgatatccgtcacgatgacattcagcagcccgtccggtacgccggccgcttcaaaaattttcgcgataagcgttccgccgcagatcggcgtttcttcatgaggcttcagcacgacgccgttccccgcgccgagtgccggcgcaacagatttcatcgaaaggaaaaacgggaaattaaacgggctgatcacccctgcgactccggcaggtattctgtacagcctgttttcttttccgtcaatcgtggacgggagaattttcccttccatccgcaccggaaatgttgcggcttcttttatcatatttttgacaagtccgatttcaaactcagccttcagccgtgttccgccaagctcctccatgattaagtaaataatcgcttcttcgtgctcttcaatgaaagaaacggctttttccaaaatggcccgctttttaaaagggtttactttgtcccattcttgtttcgcaagagccgcggcgcgatatgccgcatccacgtcatcaggcgtcgcttttcggaatgaggtgatgactttttgagtataaggatttctgttttccaatacgttccggctgctcccatccctccatcggccgccgataaactgcttatttagttcttcatattgaaacatgtaaacatctccctttcaccgaaacttgaaattagttgatgagtcatcttttgtatcggtcttaaggtgagaaaattgaactatttcacaataaaattccctttccttccgtgcatcgacgctttttagctttgtccttttaaagtggaaaattctttaattgactgcgagaaatttcgacaatataatacaaacgtcagtgtatataatgataagaatattatgaattttcaggaggacccatatgtctttactatttcggaaaaagccgctggccgacttaaaggcccagagcaaacagaccagcctgtcccgctcgttaagcgcttttgacttggttttgctcggaatcggctgtgttgtcggcacggggatttttgtgattaccgggactgtggccgcgacaggcgcaggaccggctttgattctgtcgtttgtgctcgcgggccttgcctgcgcgctcgccgcgttttgttatgcggaattttcttcatccattccgatttcaggcagcgtatatacgtattcatatgttactctcggggagtgtctcgcgtttttaatcggatgggacttaatgcttgaatatgttatcgcgctcgccgccgtcgcaaccggctggtcatcctatttccagtcgcttcttgcaggattcgggctgcatcttccggaggcgctgaccgccgcacccggcagcaaaacgggtgccgtgttcaacctgccggccgttatcattattttggtcattaccgcgattgtttcaaggggcgtgaaagaaagcacccgctttaacaatgtcattgtattgatgaaaattgcgatcattctgctgtttatcgtcgtcggtttcggctacgtgaaaccggaaaactggtcgccgtttatgccgttcggaatgaaaggcgtcatcacgagcgccgcgaccgttttcttcgcgtatctcggatttgatgccgtgtcaaacgcgtcggaagaagtgaaaaacccgcagaaatcaatgcctgtcggaatcatcggcgcgcttgccatctgcaccgttctttacattacggtatcgctcgtcctgacaggaatgctttcgtacaccaagctgaatgtcggagatccggtatctttcgcgctccaatttgtcggccagaacaaaatagcaggcattatttccgtcggcgcgattatcgggattacaacggtcatgctcgctctgctttacgctcaggtgcgcctaacatttgcgatgagcagagacggccttttgccccgcatgttttccaaggttcacccgcgttttaaaacaccgtttcaaaacacatgggtgacggggatcgctgccgccgggatcgcaggttttattgatctgggaaccttggcgcatctcgtcaatatgggaaccttggcggcctttacagtcattgcgatcgccgtcatcgttttaagaaagaaacatccggagatcaaatcttccttccgtgttcctttcgtgccttttgtgccgatcatcagcgcatgcttatgcctgtatctcgcaagcagcctgccgggcgtgacatggctcgcctttgtcatctggatcgccgccgggatcgtggtatatatgatgtattcgagaaaacacagtttgttaaataaataaaaagggaggctcttttttctgtttgagaaagaagagccttttttgcccttgataattcattcaccttatgaataatatggtgtatgcttcgtttacataaaaaggaggagaatcactttggcaattgccgccccgcttaaagaaaaacctgtccatcgtcccgagacaaccatgtattctattttgttcattatcgggatctgtcatctgctgaacgattcactgcaagcggtgattccggcgatgtttccgattttggaacgttccatgaatcttacatttacgcagctcggaattatcgcctttacgctgaatatggtgtcttccgtgatgcagcccgtcatcggctggtatacggataaacgcccgatgccgtatgctttgccgctcggactcaccgcaagcatgctcggcattttaggtctcgcgttcgccccgtcttttctgacgattttatgctgtgtcttttttatcggccttggctccgccgtctttcatcctgaaggatcgcgtgtcgcttacatggccgccggcgaaaagcgcggattggcgcaatcgatttaccaagtcggagggaataccggccaggcgatggcgcccttgattaccgcgctgattctcgttccgctcggtcaattcggctctgtctggtttacgctagtcgccgcaatcgctgtgctgtttctcatttatatcgccaaatggtataaaggccgccttattcatttgcgcgccgcaagtaaaaaatcaccggccgccgctgtgcagaccgtgattacaaaaccgattattcttgcacttatcatgattatcttcttaattttcgcgcgctcctggtatgtgagcgcgatcggcaacttctatacgttctatgcgatgaatgcctatcatgtcagcattcagcaggcacagagctacatcttcgtctttttatttttcggagctgtcggaacgtttctcggcgggccgcttgcagaccgtttcggaaagcggaacgtcatcatcgtttccatgacggcatcggctcccttgacgattttccttccgtttgcgggacctgtcatcgcctatggcgtactggcgctgatcggcgttgttctgatgtccagcttctccgtgacggttgtctacgcgcaggagcttgttcccggcaaaatcggaacgatgtcagggcttacggtcgggctcgccttcggaatgggcgcgatcggagcggttgcgctcggagctcttattgattcagcgggattgacgccgaccatgacagccgtcgcctttctgcccgttttaggtctgctcgcctttgtcctgccgagcgacaaaacattaaaagaatggcattcataaaaaaatccctgccgaaaaggcagggattttatgtttcaaccgtataaaaatgagtgtcaggaaccgcatatttcggaataaacccgtctctgaaatcaggaaacgctttttgaatttcatcaatccatttttttacgtttttgatgtacgggacgtaaatcatactgactgtcgcctcatcatcaatgtgatagtaccagcagagattgaattcgttctccgtgacgagcgtaaagcctgaaaaatgataaaaaatcagcggggtgtcattgacatatacagccccgtcgcgcaggctgacgtcatattgctcaatattccacagcgccgcattcgcgccgatcgactccgtgacatgcacgtgttcaaactgcgcgggccacttttcaacatacctttggtcaccgtatgtctttttttcttcattcatctccaccgtacaataggagatgcaatcctgtctccactgccagaccgcccgatacgcttccccggtattccgcgcgccgacaaacccggtgttgtactgccccgtcagcttgtaataagacgcaaaccgttctgaattgcggtgatccgtcagaaaaagggaagcatccggcttttccgcaaacagctcgcccgcatctgagaagaaaaagagatcggtgtccaaatgggcaaaatattcggcttcatcatactccgtcatcacatggaacagaaaagccggcttcagcgtccagcaatattcatgaaacgtccggccgccctttgcttcaagcagctccgggtcctccatttcatggagctgaaccgctgtgacatgttcccacggcacctgctgaagcagttcgtacgctttctgatcgacacacagcacatacagatgaaaatcccggcaatgctcatggagagaatgaatcatcggcatcagtttaaagatatgcgttctggaaacaatggttgaaaaatgatatttactcaccatatcacatccaatttatttaagatccacatgcagtaaatcagcagtcagcgctttgaacgcccttgcaaagtgcgtgacgcccagctttttttccgcttttgccaaaagctttccgacctccggcagctggaagctgttcgccgtgatccgcgggcttttcgtcttccagtccggatcgaggttgcggtctttaaccgcgtgcagcagttcgagaaaaatgtgcagcaggctttcatatttctcataatcaagcagcacttcgatgtctgccattatgctgttggttaactccgcgtcaaacgggccgttaaacgcgaggtgcacgtcaagcgaatgaatgtcattgtacttgtcgcacatgtacgcgatattcgccctgatgtcatcaacggaagcgcagttgctcggatgctcctgatggacgctcatgatatcgcgccgcagctgaaatctcattcccgactgatgaagcctgatgccgagatcataatcttcaaagccgtatctgacaatgccttcatcaaacaggccgagatctgccacgtgctgcctcttaactgatgaattgttcgtaatgaaaaaacgccatggcagacggtagccgttcaaatcatctccgtatttttccaaaatgcttttcagcacccggataaagtcggtatctaaatcaaagcatcgttcaagaaagcttccgtctctgatgtcactttcatcaaggagcggctctttatcgcccggcagctcttcatacagttcggcgagtttttccttatgctctttttcaaaacggtcataataaaagctgtaaatccgcttccagaacataccgcatacgacaagatcgtcccggttctcatgagccttgatatgcttcgccaccaaatccttttcggcaagcatgtcgctgtcatggaaaatcaaaatatcgcctctggcattgcggaccgcctgattccggccgtaagcgatccctctgttttctttaattctcacaaaaatcagcggaaaattcgcgctgaatgattcaagcatggataaggttccgtcttccgaaccgttgtcagccacaatcacttcgaacggctctgtgcattcctgttcattcagggacagcaggctgttataaagcctctccttggaattatatgcgggaacaatgacgcttgccttcacttttcgttcacttcctgtatatgatcatttatttgttatcatcctcagatgcaaagccgctgaactcggggcagacggcgctgaccgtcccgatcacccgcttcagaatgtcctgataaagctgatggacaaacggcaggtcggtccggtccgtctcatgaatctgccgaatgtcgccggctgtgacgatccggtatccgctgaaatgatagaaaatcagcggatttccgtcttcgagcacaagacgcccgtccttccatgaaaacgtgtggcggccgtaattccaatggccgatattcacgccgggcgtggtgatgtcacacacgttcgggaacagaccggacatgtaatccaagtagccttgatctccgaattttccttcgcccggcgcatttttgcattcttcaaggcagcgttctttccaccatctgagacaatctgtgccggcactgtcggttttgaagctgagaaaaccggaattataccggcctaaaagacgctgcagcatgtcgatttcctgtttttcaaatgagggaatgacgatatcgccccgtgacagaagcaccgaacaatccggctgattgtcaaaaatcgcgcgcggatcagcgaagaaaaacaaatcggcatcaatgtacgtgacacgctctaattccggatgtccgtccagcacgaattcgagaaataccggcttcaccgtccagcagtattcgctctgatccctcgtccgcttcagttcaaggagctcctcattttccagtgcggacacctgaatcaaggtgacattatccggacgcattgcctgaagcacgtcataggtgtcttgatccatacacaaagtaaaaatgggggcgtccgcctgaaccgctttcaatgagccgaacaaagcgatagcctgatacagccttccttttgataaaactgtgcaatatgcgcttgtcacgtctttctctcacctctgtttctgttacttttgaaaaaaggctttataccattcgatcgttttttctaatccttcatcaatggtatgcgcgggcgtccaattcagaagcttcctcgccttttccgctgataaatattggtgcttgatttcgtggcttccctggttaagcactttcggcttgaggtcactgtccatcgccttaagaattttttctacaagttccagcaccgtcagctgaatctcattgctgaagttgaacgcttctcccgcaagattgagctcctccatcttttccgccagcaaaaggtatgcctcgaccgcatcctcgatgtaaaaataatcacggataaatgtgccgtcgctgcggatttccggcgcttcaccgttcagcacgagctgaatcgtctgcggaataatccggttgaagttcaaatctccgccgccgtacaagttgccgcagcgcgtaatacagaccggaagtccgtacgtattaaaatatgtgtggcttaataaatcggcacagctttttgatacgtcatacggatgtttgccctgaagaggcatgttttcatcgtacggcagtgtcggctggtcgccgtacgctttatcactggacgcgacgatcacccgcttgatgagcggatgcctgcggcacgcttcaaggatgttccatgtgccgagaatattggcttcaaatgtggaaatcggattgcggtttgcgacgccgacgattgcctgagcggctaaatgaaagaccgtgtcaatttcatactcgcccagcgcccgctcaatcacatccagatcttcaagcgcgccctgcacgatattcatttgcttcacttgttctccctgatacaggttcgacttgggcacagtgtcacggacaagtcccgtcacattagccccctgatcgatcagttccttcaccaagcagcttcctaaaagacctgtacatcccgtcacaaacacatttttatttttccagaaactcaaacttgatcaccataccttccatacatgttgtccccggtcccacatcttgttaatttccagcagatttttatacgtatcgatcgccgtccagaaaccgtaatgccggtataccgccaattcgccgtcctttgccagctccttcagcggttcttcttcaaacatgacgtccctgtctttcggcagataatcaaataccttcgggctgagcacgaaaaatccgccgttgatgatgccgtcacttgagtttttttcagaaaagcttttcgccataccgtcttcaaccgtcagcgttccgaattgcgaggtcttttctataccggtgacggttgccgcagccccttttgattgatgatagctgatcagatgaaacaggttgatgttcgccagtccgtccccgtacgtcataagaaaggtttcatcaccgatgatgtccttcgcctgtaaaagccgccccgctgtctgcgtgtgttcccccgtgtctaaaaaagtgattttccacggctcggatgttcccaatatccgcacttctccggtagagctgtccagcgtcatgctgtgattcttccagtcataatctaagaaatattccttaatcatctctcctttgaaaccaagaagcaggataaattcgttcacgccatagtattgatagagtttcataatatgccatagaatcggtttgccgcctatcatggcgagcggtttgggacgttcattggtgatttcgctcattctcgttccttttccgccgcagagaatgactgctttcatctctacccctcttctctgtgaatattggattcgaaaccgcccgtataagagaaaccaacccgataatttgtccgattctctaccaccggtttcaaaatctactgtaagatatgagagattggcgccctttgtgaccaaaagctctctcttttttcagattggtgaagatacacacaaaaaaagagcctcacggaaattccgtaaggctctttctattatttattatcctgattcagcttttctttgccgtaatgatatttagacggatcaaccggcgtaaagtcgctcaatttgtggaatctgagcaggtctttgtacatcacgctgtcagacagcttcagctgctctgtgactctggctttcaggtttttcgtttcctgattgcctttcagttctttccctgtcttcgtatcgtatacgacattggagatggaagtatatttcggcgtgacgtaatctccgttgcggaacgtcaccgtatcatcatggtctttcgagaagagatcggtgccgaaattaatatatttcttagaatcgatgccttccaagtgaaggatcgtcggcacaacgtccatttcaccgccgtacgtatggttcaccccgccttttttgccggggatgcgaagcataagcggcacacgctgattctgcgcgttttgataaggcgtaatttctttgccgagaatttctttcatcgcgcggttatggttttcagagattccgtaatggtctccgtaaagcataatcaccgagttgtcatataaaccggatgacttcagatctttaaagaactgttcaagcgcttcgtcaagataacgcgccgtctggaaatagtcatccacagtcgcgtcgcccgttttcgctttttcgatcgttgcgtctttttcatcaagcgtaaacggataatggttcgtcagcgtgagcaaatgcgcgtagaacggctgtttcagcgactgaagcttcggtatagattctttgaagaacggtttatccttcagtcccatattgacaaggttgtcatcagacatatcgtatgtgctggcgtcaaagaatttatcgtagccgatatgtttgtaaatctggtcacggttccagaatgatttgtagtcaccgtgtaaaacggcgcttgtatagccctcactttggtcaaggatggcaggaagcgattgatacgtgttttccccttttgtcacgaaggctgacccttcaggcagtccgaacagactgttatccatcatcagctcggcgtcagatgttttaccttggcccgtttggtggaaaaagttatcaaagtacgtcatgtcctctccgccgcgggcgagtttattcaggaacggcgtaacttctttcccgtcaagtttgtaattgatcaaaaatgattggaagctctccaggtgaatcttaatgatgttcttgcctttggccttgccgaaatactcggcgttcggcttcgcataatgcgacgatgtatagttttcaacgctcgtcaggtcatcactgctggcatatgcccgctgtgattccgtctgcgccgtctgtacgccgtcataaatcgtgtaattataaaggcctaagtattttacaatgtaattgcggtcaaacgttcttgtcagcagctccgggcggtcctcttcggcaatcgccaggttcacgaagaacaacacaatacccgtcacgataattaatgacgtataccgttttttcagcttgaattccttcagctcacgtctccacaccagaagcgcgattaaaataataatatcaacaaagtataaaatatcatggccggacataatgctgaagatgccgtctcccatatttccgacattaccggattgctttaagttcgggaatgtcaagaaatcatcgaagaatcgatagaataggatattggcatacaaaataaacgtcatgatgaaatcaataatcaccatgataatcgctgatttgcggcctttcgcaaacaatgccagtcctaaaaagaaaatggcgcttgagaacggattgatcacaagcagaaactgctgcgtcggacccttcaccccaaggttgaattcagcatgataggctaaatacgttttggcccaaaacaaaataatagccagtacaaaaaaactaagtctgtaagaaaataatttcttcatggcaacctctactttcctaaacactttaaatctgtattcttactttttgcttcaattcctgctttccgagcaaaacgaaagcatcacacagccccataaacacaccattttaaaaaacgatatatttatcattcgtgtcatgcctattgaacatcttatcccgccagccattagacgcaggatatccgttcttcgtttcacatttttttctggcattaaaaggtaccttatcagacccggtctgaaaataggagataccaaatataagaataacacaaacttctaaaaacgaaaaatgaatatcaaagacagccgcccaacaggcgggctgaagttattgtatgcaaagggactgaaaaacttgaaggttttttttgggtgatgtaaaaaaaggaccggagtcatccagtccttttcatcacatcgctcaaatccccgcccaaacatcttttgcgtaaatgccttttgtctggaggtccaaaagccattcttgcgcttgccgttcgtctgtttcgcggaccgactgatacgctttttgcagcgttgcctctacatcgggcgccattttgctgccgtctccgcatacgtagaggcgccctccccggccgaggatggaaattaaagcgccggcgtctttcgccattaagtgctgcacatacgttttcggtacgccttctttgcgggagaaagccgtatgaagcgtcacgattccgtctttttcataagcttcaagctcgtcacggtaaataaaatcatgatcgtttctgcatccgaaatacagatgagcctcccccagctcttttccttctttttttaacgctgcccgagcctgcagaaatccgcggaacggggcgactcctgtgccgggaccgaccataataatcggtttttccggatcttccggcagccggaatcgtgtttccggagtgcggacaaacatcacgataccatcctcagggcggcggtccgctaaataattcgaagcgactccgcgatactcacccaaaccgctccgggcggggccgcgaacgacgccgacggtaattgaggcctgcccgggatgtttccgaggcgaacttgaaatcgaataataccgcggcttcagcgggcgcaaaagctccagaaatcgctcaaacggaagttcacacgcttcatatttttcaaggagatcgagcatcgagacgcgcgatgttaagatttgctcctgatagacgccctcctcaagaaaatcttccaattcccgtttgtgcggcggacagaccgtataagcggccatttcccggatttgagcccttgatgccgcttcctgcaattcgacacagctgctcagaagatcatgcagcctgaccggccgatcgagcgggagatgagccgcgctctgtccgctggccgtcagcagcacttgatcattcccgttcagattgaaccggcggagaacacggctgacctgctttttgctgtttaccggcagcacgccgagatgatccccttcatgataggcagcctctttcggcagagtgatttcgatatgccttgtgctccggccgctttccggcgcctgaagttccctgttttccgcaacggatgcgtaaaccgcttcatacgtctgtgccaacggagacccgccaagcccgctgacaaattgaaggcccagcgcacttcgctctttttcggcattttcattcagcttaagaccgaatgccttcatggcgtccgtccacatgctttttttccattcatcaagctttccttcaaaatccccgctgacgtccccttcgcctcgggcagaaaagcgttccgcccctttttcggcaagcttctcatcaatcagtctcggcacagcctgatatgtcgccgcccagttatgatcaccgcagccgaagacggcatatcggacaccttccagctccccgggtttgacttcttcaagccattgaacgaattgtcccgcgttgctcggaggctttccgttataagaggacgtaatgatcaagagagctccttctttcggcagttttccgatccggtcatttaaaggcgccgtttcagtccggacgccgtgcatcccggcagtatcggcaagttcccgcgccacgccttctgcggttcccgtatctgagccgtacaaaatcagaagcggtcggttatcaagcccgataatggatgcgccttttgtttcccgtttttctttttcgacgtcttccgccgctttttcagccgccgggagagctgccgcaacggctcctttgtttctcggccgcacccggatatgaaagtcgccgggcttaatcgtcagtgtctgtttaatatcgagctcataatcggtgtgatcgataaaggtaaaatgctgcagaatcatccccagaacaagagttgcttcatgcagggcgaactgcataccgatacacgccctctgcccgtttccgaaaggcttatacgcatggtgaggcactagatcaggatgttcaaaccgctccggataaaattcctccgcattgtctccccacgcgtctttatcacggtgaagctggggaattaagacggaaattctgtctttcggcgtgatcggatatttcccgccgatcaccgtatcctctttcgcataaaggctgaacgcaggcgcggtcggccataagcgcaatgactcctgcaaaatcattcggatataactaagctccagtacttgtttataagaaggaacgggatcggtcaaaacccgatcggcttcttcataggctttttccaaaacacggggatgtttcagcagaaaatagatggcaaaggaaagcaggccgctggtcgtttcgtggccggcaattaaaaacgtgatgatttgaaaccggatattttcatcatcaagtttttcgcccgtttccgggtcttccacattcagcattctggccagcagatccttttcatcccgtccgcctgaccggcgctctgcgataatactgtctactaacgaaaacatcgcctgaatgtcatgatgaaattggcgcttcgtcctgatcatgagcttatcctgaacatcaaggcgctgcatttggtgcatcgcttcatcaagggcgcgcaccatgctgttgataaacggatgaggcgtttccctgtaatagctgttaaaccgatagttaaagccgcaaagcccgatcgtatcgagcgtcaggcgggtcatatcagcaggcacatcaacggcctcatccgggttcagcctagcccatttttgaatcagctgcaccgcgatatcagtcatcatcgaatgataatctttcatcgcgcgctggctgaaggtcggcatcagaatattatgcgcctttcgccagttaggctcatgcgtccagcttgtaaacagcccgtcaccggcaaacgcccggactttctccaaagcaccttcaatgcttttatcgaaccgctcttcatcacatacctctttcaccagttcatgtccggacacgacgataatggcgcccgccggggtatgcagctgaaaaataggcccctgctcgtttgccagtttgatcagcgacattgtaggcttgtctttatcaagcaaaggaagattgccgagaggaccgaatgtcttcggctgcggaatcggacctgtttccttcatgaataacaccctttcttacacattgatgcgttccttccaactacagtgcccttttcaccggccaattatccgccgttacggatcaatccccggattgacgattgataacggttttttctatactggagaggcttgttaaatacagaaataaggtgagttcacatatggattttgaaatcaagtttttatcgttttatgtcattcaagtggaaggaaaagacgaacaggcaaacaaacagttcaaacatttccagacccttgacacagacgaatttgaagaaagcgagctgaaggattttcttgacggggaattgaagaaaatcgtcaaacggaaagctgaacggcatccgcaatccgagcaggtccccacaaaaatcggccattttatcacggagccgggccatgagcttgattcaaatccgaattacaaccttttcaaccgcgccagacttgcggatacgaaggaagcatttatcgaggcaagcgaacagttcgtccgtacttatcttgacacgagcgccgtgcgcggcggtgtttttatcgtggcttcggccgttccgcgcaaatattttgaggacaaattcgtctttatgatgaaatgcgatttcgagccgaaggtcgcccgcatctcagacgcctcgtctctcattaaaaaggtcgaaatggccatcacgacaaaaaacatgaaaagcattcaatatccgtatatgccggaagaaggcatgacggaagagcatgagctgaaaatccaccaggcctcgcacgcccgttatttcgaagattttctcaaatttgtcgaatatggcgaatcgatgccggaaatcatgaaaaaccaagtcatgaacatggtgcaggagcacgtgtatgaaacttttgaagaaaacagcgaagagcttcagcagtttgagcacgacattgaaatttgggaagcgagtgaaaagcgggaaattcaggagcgcctcgacacccatcaagtcatcgaggcatccgcgcagatcattgaacacacgccggaagccgagctgaaaatgaaagtcggagaaacagagattaaaggattactggctgatttcggcgaatccatccatctcgcaaaagtgaacgggcgctatgtcgcgctcattgaggcggagacgatctcgtttgaaaaaggcagttcgccggtggagtttcacaagcctgaggggctgcatgaggtgattgagcggatacggaataaatctgaacaagactgacaaaagtccagacgccatgttctggactttctgtatttaataaggctctttgagcaatcgatagcattcaccgatgatgtcttggacgccgggcgttccctttatctcgcggcggacgatttcagatgagagattctgcacctgtaatgcccgctccgcccgtctttcgaagtatgcttgacatgcagtttcatggttttcgtgtttttgcagttcttcactaagcacaatcgcgtcttcaatcgccatcgccgctccctgcgccaatgtcggcgctcctgcatggacggcatccccgcccagaacgacgcggcctctgtgccacggttctttgaccgccatctgctcaatcttatgaaacaaaacgggatattcctttgacatattctctgtcacaaacttcactcccggaattccgcgcagcaagtctctcacccgttcaaaacgcgtgtcctcgtcatccctgaagtcagcgtcatacggccggatgataaatacgtatcctgttttttcagagagcggcacgaccccgacctgcgtctgcccctttttatacatcagtgtcgaatcatgaaaaaccggctcgggaaaagaaatgtaaaatctgtgcgctcccatgccgagatactctgttttcacttccctttgcagcatgtgattgcggacagcggagcggatgccgtcaaagccggcgaggatgtcagccgtcatcgcggttccgtctccacaatgcaccgttatttcatctgccgtttcttcgtaagacacgacttttttaccgggcagaatcgtgacccccgccgcctcagcatgcttgctgaggatatcgtttaatgtttgccgcaatatattattccgccccggcaatgaatcatctaaaaacgcctcactcactttaaactgcagcgttccgttttcatcatgctgcttcagccaatccgtttgaaagccgtgttgacagcattcatcatacacaccgatttcccgaagcacccgaagcgcattttgaggctgaagaatgcccgctccgctttttcgcatgtcggacgccgcctcgcaaagggttacttcaaaacccgctctgccgagagaaatcgctgcggacaggccgccgatccctccgcccgctatgatgatctttttcacttcatggttcatcacgataccgccttctcaatttatttatcatttgttaactattagccaccttactatattggctgaaaaactgtcaatctttataggttgccttttgaatccggcaagcttatactttgaatcactaaaatggtacggaggcttacaaaatggaattgagacatttgccggattactcgcagattgccggacgcgctgagatttacgccgatatggatgctgaatcattgaaaacatttttgacgttatttgatatgtctaaaaaaatgaatcaggtcatggagcattatttctcaagtcacggattgtccgaagggaaattcaaaattttaatgtttctgtttgacgaacccggccacagcctgagtccgacggagctggcgaaaaaatccaatgtcaccaaagcgaccatcaccggattgatcgacggactcgcacgggacggctttgtaaaccgcagccggcataccggtgacagacgaaaaatcagcatcgaacttacaagggaaggaaaagaaaagctgatgctgtttcttcccggccacttctccaacatttcaggagtcatggaaagcttcaccgctggagaaaaagcggaattgacaaaaatgcttgaagttttatttgataagcttctgctgttttccggagacagaacataaagtagtattgtaaaaacaaaggcaaatttctatgagatagaaattgaagtaaaaagatgagggttataaaaaaacagcctgcacattagtttgttcaggctgtttcagaagaaataattttaaaattactttctcttcactataaatgcaggtgttttaatgctggaagttacatttgtatatcgatttttagtcttcaacctcactctcacactatttgatcctttttttaacgatttttgatttgagagtttaaatacttttttaggtgttgagtgactgaaagaacctttctttgtttcattagccacccattttgaaccgttccaaacatcaattgtcatggaataatcaaatgttgcgattgtcccgcccccatatgatgctacacaatcaatagaagtagcttttgcagaataagaatccgcatcggtacaaactctcaatacatatgttgcataatctgtactacaaggcataatatccttcccctttcaaattttttgaaacaggtttgttattatgacaaaccctccgttcacttctagctggcaaacgtatgacaaagggaatctcatggcttatgagattaaaaattcaaaactcttaaaattaacaaaaggcgcccctcttagcagggcgcctttttcgcgcgattaatcatcactgtttaaaatcccgaaaaaccgaagcaggttgataaacaagttgataaagtcgatataaagcgtcaatgccatcaaaggaatcaggtcagccgtgatgtcccggtgcttgatctggttcagatcgtataagatgtacattgaaaacacaattgttccgatgacggaatacgccatcatggcggcggaattcagcgggctgaaaatattaaatatccccactgcgagaagcgcgataagagcgacaagcaagaaggaccataaaaacgacaagtcctttttcgttttagcgccgatcgtaccgagcaccgcaaaaatgacaaacgaagaaccgaatgcctccaatacgacataggctccggctgcggacgcataatggctgatgatcggaaacagcgtcattccggaaataaaagcgaatgaaaagacaaacacatatccgacggctttttttcggcgcagccaaaatgcggcgatgatcatgacgacctccaagaccgacagcggcagcatcaatgccggcggaatgaactggcccgtatacaggccgattgtcgcaactaacagtgtaaacacaaataccgtgataatgcgctgcataatagattgtttgctctcataagcagcagtttgcatgtcaaaagtcctcccaaaaaatgatcgtgataggtctattataaataaaatgggagaaatttgcatgattttaagaagattttaaggatgtcaggcctgacgtttcgctgcgcactcctgcatatccatgaaatcatgcagttttttcgtcaatccgccgtgcccgaatcggatatttcccttctgccccggcgttttcacgaaatcaaggaatgccagcacataaagacgcctgacgggaatcggaatgacgcccgcatcataaaaccagccgtcaattgtattgagcacgcctttatttatgccgtattgcttcgtgcaccaatgcagaaagcgcacttcgggcaggtgcagataccggctctcccggaaaggaacagttgaatgcttcatatgtaccgcctcctgtcattggctgttttttaagattgttttacttctttgcttttcagggaaaatcgatatttctccaccttatcaatttgtgtcacttgggaattatgaaccgtaatctgaacagtcccgaaatcgagcgtttccagcgcactgataatcttttcgatcacatgcggatctacgtttcctttggacgtcatcatgctccccctttatgtctggacgttcgtcttttgacaatgagtgttttaatccatactattctgataagaaatatataattatactattatgttttcattcagaaatcaacagcatttacacaattttcggatatgttttctttgcgaaaactttcacttcctttgctttgacataaaccgtgtcgccgacgcccgcccccaaggcgtcatattgctgtttttaagaacgcaatcttcacgttccgacatatttaaattgttttccgctgacaaaaaaagcgccccgcctctggacggagcaccttttttctatgcttttgcttcctcgatcacacatgtgacacccatgctggcgagcgcctgctccagagagccgtaagtttgatactctgaaaaatcaagtcccaattggatagaagtctgtgccacatcaggccgaatgccggaaaacacggttctgatgccgaggagaaataacgttttcgacagcatatacaattgctgcgccaccatcgtatcgacaatgggcacaccggacagatcaattacaaggtttgtgatccgtttggcgacacagttttccggcaccgactccaaaatcacacgcgcccgtctcgtatcaatcgcgccgatgagcggcagagtgccgatcgtatccgcgatcaaaataaccggacagctcaattcggaaataagctcctgctgagatgacagcctcgcgatcattaatttctgaaactgttcagtaaaatccgtcatcagctgatcaaacgagccgttgacaaggtaattccagcggcgggcatcctcatttgttacaatgtcctgatgctcatccataaaacgggtgaccgcctcccaaaagacggttcttgaattgccgatcgcctcaacgacctcatgaacctccgcgtcttgctccactctgcttttcgctacctgagcggcccatttttctttgttatgctgaaaaacggccggatcttccaaaaaagcgcttgcgatgaccgtgtttgtaaaggtatgctgctcgatcagcagccgtttcatttcctcacttaattgatccgcagaataaaaacgccctctcagcttccgtctcagcttgagccatttttccgtcagctctgccgaatgtgtaataatataatcatgaagtaattggtctttgttcactgccgtctcctctttcaagaatatgtacttttgtctaaattataaatcggaatcaccgatcgcactagagaaattaaaaaaacctgcacattaagcttttgattgcttttttcggcaggaggatacactataaaagaaatgaaacaggaggtcagtatgatgatcaaaaaaatcgcgacagtcgccgtatacactgatgatcagcaaaaagcgaaaacattctggacggaaaaagcggggtttgaaaccgtcgccgagcatccgatgggaccgggcgccttctggcttgaggtagcgcccaaaggggccgccactcatttggttatttatccgaaatcgatgatgaaaggcgccgagcatatgaaggcttctatcgtatttgagtgtgaagatgtctttgccgcatatgaacagatgaaaaggaacggcatcacctttttagatgaaccgaaacaaatggaatggggcagcttcgtgcaatttaaagatgaggatggtcatgtctttctcctgaaatcgtaatccgtcaggcatcttaattgactttgagaatcattttcatttaaaatgttggataaaacgtaaaaaggattggagagctgccagatgtttgtgcaaatcagaaacatgaccgtaaaagaaggacatgccgacaaagtaatcgaacgcttcagttcagaaggcgtgattgaaaagcaggaaggtttgatagacgtaacggtcctggaaaaaaaagtccgccgcggtgatgaagaagtcgtcgtgttaatccgctgggagtcagaagaccattggaaacaatgggaaaaaagcgaagaccacatcgcggcccacaaagcaaaccaaggcaagccgaaacctgattatatgcttgggacggatgtcggtatgtatcatgtcagagccgttaaaacaggcgtacacgaaaaataataaagagcatttgccccagggcaatgctctttttattttttctcctcaaacggcaggacaaacagcggtttatcgggcttccattccgcatacagcacgtcctccgtttttttgatgttcagctttttcagctcctgattcagctgcttttcttccagcccggcttctttcagattttcatacagcacttcgccgtcaataatcagcgtgaccggcaaagagacttgcttcggctttatttgcatgtcgccgtttttcgtcgtgtcatattgaaatttcggcaggacgctgaccatcccgtttgtttctaaaattgcgtactccgcttcctgtatagaaaagcaattcgcctgtctgagaaggctttgcaattgattaatgtccagcttattctttttcagcacatcatatttcagttttcctttatgtatgataatactcggctcgccctccaacagctttctggagctttttactttctgcgtaatcagttcgatgagataaattaaaaccccccataacagagaagcaaaaatgatttcaataatcctgacgcctttatcatacaccgcatttccgaccagttcgccgaggatgagcgcggaaataaaatcaaacggcgtaatttgtgagaattgagtttttccaagcaattttaaaatcacaaataaaatacccaagccgcatactaactcccaagccactgtaagtaaatgtcccatattcgcaccttcttcttaaaagtcattaccattatggacattcgcctgttttctatacagcggccggcaatacacaaaaaaacgcagacgaggctgcgttttttcacttctgcttactgtttttgattcgatctgacgacccgtaagcatacctcagcggcataaccggcggccgctccggaacccgtaaacatcgcggcaagccccaagcccatgccttcccagccgccgacaccgaaaatgctgtaaacaaccgtaccgaaagcagtcaggcccagcaccgccaaaagccactcaggccacatctttttcggccatttcttacggagcacagccgatacggcaaagttaagacaaaatgcggccagacagatcagataaaaaaaccccatgtcttttgcacctccgtcatgaggagctttttatttgctcacctttttttcaaacaaatgataacccggcgcgagtccttttgattcgtaacccattccgctgtaaaacgactgaagcgccttgtttccggacacgcagtcgagccggattttcgtttttccaggacaagacacccccgtctccgcccaagtcatgatcgtccggccgagccccgcccctgcaaaccgcctgttaatcgccagccggtggagatatacggactcctcatgtccttcatcgccccatagacgtctgtcccacccgcttgcttcgggaagcagcatgacgacgccggccagctcttcattctgcctgaataaaaaaacataccctttggcgatcgcctcccgcatattgtgggtatcttccccttgcagaaggccgctccactggttcgaccctttatcgcgaagccattctgccgcctgcacgagcagatccatgacttcttcttcatcatccttccgggcggaggtgacccggaatgcccccgccttctcctccgtaatcgtaaatggtgtcataaaatcctcctgtaatcagaatattcgacacctttattatagaccaaacgcagaaaggaaaaaaacagccgtcatgtttgagggccgtttaaaaaattttcttcttatcacgttcttcttttaaaatctcaaccgcttccctgaaacgcatagagtgaacgatttcacgctcacgcagaaaacggagtgaatcattcaggtcaggatcatcggaaatatcaataatccattgatacgtcgctctcgccttttcttcagccgcaatatcctcatataaatcagcaatcggatctcccttcgcctgtatgtaagacgctgtgaacggaacgccggccgcattgtgataaaacagcgcgctgtcatggttgacgtaatgatcactgagccctgcatcacgcagctgctccggtgtcgcatcttttgtcagcttataaatcatcgtcgcaatcatttctaaatgcgcaaactcctccgtgccgatatccgtcagcaggccgatcaccttgtcaggaatcgtgtagcgctggtttaagtaccggagcgctgcggccaattcgccgtccgccccgccgtattgttcaatgagaaacttagccagcatcgggttgcacgtactcactttaaccggatactgcagctttttttcatatacccacatttacagatccctccttatacttgccatggccaaggaccgcggccccagtcccattgagcgccggcctgactcacgccgaattgcagaagcggtccgtactcaggctcaaaccgttttctcagctgccttgagtaccgggaatattcatgaaactgctgaagcgcgagacggtcatggggatgcgtatccagataaagcgtcagctccaccaagacaaagtccgccgcctgaatttgctccagcagccgatagtattcatcatcaatctttttcgccatattcgattcccccccgataaggattatcatagaaatcgtaaagatccttccaaagggtcccttttcttaatgcctccatcggagaaaactgctccaagtgataaggctgaaaccgcatataaagatgcggcggcgttctgtagtattttctcccgatcggcgggcagggatcaaaccggctgtggaagggtttataggatttgaccggtgtaaacggctgattttctttcattacgatcctcctttcctaaacacatgaccttaataggtatgaatccgtatcagcatttatgccctgtaagaaaataaaaaagcccgttaaaaacggactccatgcagctcatctggaatttgaagtaaaaaaatcataatgaaaaatctgattgaaagcactgataatgtttcaatgtatattccgtaatttgctgatcatattcaggatattcgtatctcaataaaacagccactgactttgaatatgctctgaagagaccttggcagtcaaacaatgccttccacacgctttcataagtattgccgacataagtattcagcagaatttcccaatctttcgcattcatgtaatgttgaatatacttataattcttccctacacttaatgaaaactgatgctctatcccaatattccacgcaatcatacgcaaaacattaggccttaaaatgtcattcatatggtccagcgcaaacagtatttctttgcgcattaatcctttaatcacataggttgaaaccatccaaaattcattgcagcaatcatcaaactctccgggggtcggtttctttatatgatattgttcatcactcgcaatcatcttactgttgattcggtcatccttgtctaataatatttccgccaaaccatcactctgtgtaaaataatcctctgtttgactcagagggatcaaagttaagtcgattttatgatgatctttaaaaagcatgagataggagaaccagtctccgagttccggagggaaaagttccatatcttcaggtttttgcatcatcattctttcgccaaactgatccagccagctttcatcagatataaaagagtccatatcggtcacaaaataagaaatatcatagtcttgaaatttgtctcgcggtacatttttattggttcttgatccctctaaagtgacaagacggattctctcgtccttcatcgcaatatcaagaatcaatttcatcatttcgtcttcacttctcacatgtaaaacctcccgataaagagatttttacagatcatgcttttcagtttataaacaacttgctcatgatttacagaaatgtcatatgtacttgatgattttgctccaatcgtaccacagctgcaagaacatgagaagagcactcttgctgttccaagagtgcttttcccgaatggtcagatatattggctgtcccgatgatgatggtgatggaacgggtagccgccgtagcctccgccatagccgccaaaaccgtaccccggatatcctccgaagccgccgtagccgccaaaaccgccgtaaccgccgtaaccgccgtaaccgccgtaaccgccaaaaccgtaccccgggtagccgtagcctccgccgaaaccgtatcccggatatcctccgaagccgccgtagccaccgtagccgccaaaaccgtaccccgggtagcctccgtagccgccatagcctccgccgtaaatcggtcttctttcattcatgatttatcgctccttcacataggttacagtccagtttatgacatgcggaaggaaacgtatgggcatccgcccagttttggcgaaataatcaataattgcttacggagaaatacgatacaggccggccgcataagcaaaataaaaaggccggaacttatgccgccccggcctttttgtctttattcgcctaaatctacattgtgataaacctgctgtacgtcttcgaggtcttccagcacatcgatcagcttttcgaattgagctttcgcatcttccggaagctcgacttcattttgcgcaagcatcgtcagctccgcaaccgtgaactcttcaacgccggcatttttgaatgcctcctgcacggcatggaattgatcaggctcagcatacacgataacactgtcatcctcttctaaaatatcgcgcacgtccacatcagcttccatcagcaattccagcgcttcatccgccgtcttgccttcaacgccgataacggcggtcgcatcaaacatgtaagcgacagacccgctcacacccatatttccgccgtttttcccgaatgcggcgcgcacttcaggcgccgtgcggtttacattattcgttaacgcatcaacgatgatcattgaaccgttcggcccgaaaccttcgtaacgcagctcgtcaaagttctcctccgcgccgcctttcgccttttcaatcgcacgctcaataatatttttcggcacactgtacgtcttcgcgcgctcaagcaccacttttaacgcctggttcgattccggatctggctcgccttgttttgccgccacataaatctcacggccgaacttcgcgtaaatccggctcgtatttgcgtcctttgatgctttcttttctttgatattgttccacttacggcccattttgttccactctctttcacgaattgaatctgtatgataaatactctgcttctattatacctcagcggttgggttgtttcgagtgtaagacattagaaaaaacaggcacgcttaaaatcaccggagcgcagtaagccgaatttgaggattattgtacaaaacataaaaaagcctcccttcatacaggaaggaagtcgcaagtcaaaagattcattttattcttattacctatttcctacactgtatatcctgactcccgtggtaaaattttgatatcgaacaaaagaaaggatatggtcatgaaagttttcgaagcaaccaccctgctggccgctgccaaacagcgcgcgggtgaatacaaaaaactgcgcggtcagatggttaatctgaaaaaagcatttcaaggcgtggctgatctcggtgacggcgatttctctggtcggggcgcagataacatcaaagcctttttccaggaccacgccggcgtcacagacagctggcttgatctgatcgacatgaaaatcgcatttctcacaagccttcccggtaaggtcgaagatgccggactttccaattcgcatgtggaggaatcatttctggagcatgagctcacccacgccctcagtaaatcaaaggcgattatggaagagcagaaaaaggacatgcgctccatcctcggtgagatcgatgacatcatctcgcttgatctgttttcaacggaaagcacagatcagaagctttcttcagctgacaaaaaaagaagcgaaacgatacataagctcggcaagcttgatcacgatctaacgaaagaatacgcagaaaccgaagcgaacgaacagttcatccaagctgacttccagcagcttcaaaatgccacgggcaaaggaaaaagcgccacgccgcttcactacaacgccaaggcgtaccgtgaaagcgacatccataagaaaaaaggcgagattgcaagacattcggatgcttatttgaagatgaagaaagaggaagcgaaggaacgagagattgaaaaactgaaagaaagactgaaaaactacgattatgcgaatgctgatgaattctactcaatggccaaaacaatcggctataaaaacctgacaaaagaacagcagcgctacttcactcaaattgaaaacacgcgtgaacttacagacggtttcaaaggcgttgccgtcggcctttatgattccggaaaagacgcggtcacaggcctgtgggatattgtcacagatccgggcggaacggttgaagccattacaggagcggcggctcacccgatcaagacgtatgaagccatttcagcggcaatcgaagaatcgtaccaaaaagacatggtgaatggcgacacctactcaagagcaagatgggtgtcatatgcagtgggcaccgttgtgacatcagttgtcggcacaaaaggcgtcggcgccgtctcaaaaacaggaacagccgccaaagtgacaaccaaagtcaaaacagcagcacgcaaatccgccgcagcacaaaaagcgataacggtctcaaaacaaaccgttgatcacatcaaacaaaaagtaaacacaggcatagaagtatcaaaaaaacgtgtcaaaaccaagttacatcaaatcggagatctcaccctggctgatattctcccgtatcatccgcgtcacgacgtagtgccggcgggcgttccttacaacgcagtcaacggggtcacacttaaagaaggacttcagaaattcgccaaggtcatcctgccgaaaccgtacggaacctccgcaagcggcagacggacaccggcaccgcatgtaccgccggtaacggtcaaatacggcgagcattttgcgaaatggaccagaaagaaagtattgaagccgaatgtcatctataaaacaaaagaaggctacacgtacaccactgacaactatggtagaattacaagtgtcaaagcagacttgcagctgggagaagcaaaacgcaaccaatatgcgcaatcaaaagcaggtaaaccagaccgtctgacagatgacgacggaggccacctaatcgccacccaattcaaaggctcaggccaattcgacaacatcgtgccgatgaattctcagattaataggagcggcgggaaatggtacaaaatggagcaagattgggcatcggctttgcaagcagaccctccccaaaaagtatcagttgaaattaatgcattgtataaaggtgattcattaagacctactgcttttagggtgaaatataaaattggtgatcaagaagctaaacttatgagaatcaaaaatcaggccggaggttaatatggagacaaaaaaaatggggcaattatatcaaaagatagcagaaagcattaatgagatcattccatctgaatgggaaagagttattctttatgcagaaatacttgacgattcatctgaagttttcttttatttcaatactccacatagtgaagattttatatattctcataatatccctgaacactatcatgtcagtgaggagatttatgaggagctgttatttgacttgcatgacttattcgaggaattacgagatgaatttaaagaaaacaatcaagatatatggactaatctaacacttaatctggggataagcggagaattttcgatagactataattatgaagacgttattcaatctccatataccatctctcaaagacaaacaatctggacttataaaaatgtaggaatttatcctaagagtaaacctttaaaatcctttttagaacagtatttaaattctcaaaattaaaattccccctcctttattggggggtttttttgatacaaatgatccttacaaattaccaattataatgctggaggctgatccttgttggaaaatgaattaaatgcattatatagaaacatagctgaaatcgttaacgaaatgataccagaaccatgggagaaatttttgttctatgctcagattcagagacaggcggaggcacttactttttttacaattctcaaaatgaacctaattattttaagtacagtcttgaaattccgtttgaatttgatattgacgaaaatgaattcgatcagtatgagatggaattatttaaactaagcgaaaaaatgagagatgttttcaaagatcatgatcaagaattattttattctttcactcttagcctagaaagatccggaaaattaactgtcaactttgattatacagattggtttaagacagattatagtttcagtgatcagcttatcatctggaaattcaaatacttaagggaagaacctaaggatccatcattacaaaaattaataaaaaaatatttagatgaatatcctgaaaatccaatttaataaagttgggataatgatgttagaaaaagcttatctaaaaataactgatgtcttaggaaaaataattccttctgaatggagcaaagttgttctgtatgcagaaatactagacggttccagagaagtttattttttctttcaaacacccgaaaacgatgaatatatatactctcatgacataccagaacaatttcaggtcagtaaaaaaatttataccggactactactagacctccaagagttgtttatgcagttacacactgaatttaaagaaaataaccctaaagcatggacaaatttgacactgaatcttgaaagcgatggaacgttctcaattgattatgattatgaagatgttattgaatctgatttggacgaatacgaaagacaaatgatttgggagttcaataacttggggattttccctgaagacgaagaggacaaagaatttgttaaggattatctaaatattaaataatgctatcaacaaaggtagaggatcatcaatggtagctgaaaaaatggaacaactatatcaaaagattgctgaacatctaaatgaaatgattccatctcaatgggaaaagatcgttttatatgctgaaatacttgatgactcagcggatatatacttttattttacaacaccaactaatggtgattacttatattctcattatatacctgaacaatttaaagtaagcgaagagatttacgatcaactgctgattgaacttcaagagctatttgaagaactaaaagaagaatttaaactaggcaaccaagatatttggactaatctcactttaaaattagaaaacaccggaaagttttcaattgattataacgatgaggatgttttattgtctgaacttgatgaccttcaaagacgagatgtttggaaatatcaaaatttagggattttgcctaaagatgaggacgatagaaaattcatagaagagtatctaaacatataataagctttcaaacggctaaaaaaaattaaaaaggattctgatattgtggaaactgaaaaaatgggcgaactatatcaaaaaatcgctgagcaaataaatgaaattatcccctctgagtgggagaaggttgctctttatgccgaaattttagatgattcttcagaagtttacttcttctttagtactccacaaaatcaggaatatatatattcacacgatattcctgaacattttaatgttgatgaagatatatatgacgaacttctatatgaattgcaagattactttgaagagttacgggatcaatttaaaacaaacaacgaggacttatggacaaacctcactttgcatctcgaacgaagcggtaaattcttctcaattgactacgattacaccgatgtcatcgcctcagacttaaacggaacacaacggcaagtggtatgggaatatcaaaacttggggattttgcctgaagatgaggacgataaagaatttgtaataaactacgtcggtctataagtcaataatggctcagcacttccttgctgggctattttttataactacatcataccttatgaatgggcaaaaatatatctttatgcagaagtattagatgactctcccatggttctctttcacttcaagacaccaaaaaaacgtcaactgatttattcgcaagatctaccagcctgatacagtgtaaataaagatatcttcaacacttttcaagagaaatccgagaactttttgaggaattaagaattgagcacaaaaagaataatgataaacaaaacaggcagcatccagtaaacggatgctgcctgttacatcgttatgtatcgtctgaagaagtcatttattttgttttttaaatatgaaaatagatatgacggtaaatatgatggctgtaatgacaatgacccacaagctcgcagccgtactgataaaatggccgtttaacttgtagacgatcccgtaatgcttttcatattcctgtatttggtccgcagaagcatgtttaaacactttatcaactgagtctgtcataaacgcttttctgaacagaacggcggtgtggctgatagggaaatacataataatcttctgcacaaacaccggtacgccgccgatcggtacatatactccgcataaaaaaccgatggctgttccgacaatcgtacttaacgtcgaaaatgcattttgtgtgtgaataaacagcgttaaaaataaatttatggaactcgagagtgcaactgaaagaataatgatccccaatacttcaagtatatctgtaccgcttaaaagcttgctgcctgttgaaacgagaaaaatttcacagcctaaaaaggcgatgaaagaaaagatcaagccgatgacaaatgaatgaatgacatagctcaattggatggtcgcccttgataaaggagctgttaaaaagtcatacgttctcttgctttctttatctttcaccataattccgaaagcgcctaaagtcgttgtcacagctgtaatggacagcaatcccgccaccatccattcgttcaccattgctttggaatcatctgtcgaaccgaccagggccttaatggcgtccagctgtgtctgctgtaagaacacggcatataacagaatgacgataaatactgacagcaaagagagaagcaaaagcgttcgatcacggaagtatatttttatatttctgctgattaaactggataaagacttcatttatgcaatgctcccctttactggcaaactgcttccttgttcttcgataatatggataaacacatcatccatatttcctttaatcacttcgaaagattcaatttttccttcaagacctttcaaaatgtcaaacgcttggagagtggactctacacgaagggaataaatagagtttttaaccgtaaaatccagttgtttattttcaaaccatgccgtcggatcaacgccttgcttaaacatcatatgcagactgtcaaacgcatattgatctttgagctgactcggtgtaccctctgcgatcaggcgtccttctttgatgaccacaacgttatcagccacagcggcctcctccatgtaatgggtcgttaaaaagatcgtcatgtttgtttcttcctgcagccttttaatcgcattccaaacaaatactctcgtttgcggatcaagacctgtagtaggctcatctaaaaataatatagtcggtttatggatgatggcacgggcaatatccgctcttcttctttgtcctcctgacaaatcgctgtattttttctccttaatatcatccaattttaaatagtctgttacaaactgatagttctcttgcacttgtgccttgcttaaatgataatattgtccgcggttcatgatattttcataaacggtcaatcgttcatccaaaatgctctcttggaaaacaactccgatctttttgcggatatgattattctctttcccctcaccaagagtataaccatctattaccacttttccggatgtctttttaatcagcgtacagagaatatcgatagtggtcgatttccctgcaccgttcgttcccagaaatgcaaacagctcgccgcgtttgacagaaaaggatacccctttcactgcttcaaatgatccatattttttgcgcagatcggttactgtaataatgtcttgttcttctcccattctgttcacctcgaaaaataagattctataccgttgttcactaactttatatcgtcattcccgccaggattttctcatttttatccaaatttattatctttttataaataattatcttgattatgaagatatacgtacataaaaaggcttcttaaaagaagccttttatcgctttacgttaatattatgctttcattccccaagtcattaacaatcgccactttgttaagaagctttgtaaggatctcctacacaaatagatttttcttttcctgcaacaacggtagaaatcctagtcgcattcgttaaaaagcctttaacagttgtcgcaaaatcttgcctccctgctttttaaaggtacaagatcatagcgtgattttttcccaattccgttttaataaataattaaaaaaggtttcatttgtgcttatatgtggctttttcttcagcaactgatgaagacttaaagaactcattctctttgtaattcatttgcatatgtttcagccttttaaaaaagtaattttctaattgtttgtctatacaataaataaaacagcctttttgtccccgggtcatcaaagttctgtatgtgttgcgaataatttcgtctgcaagcttctcagcttcttctgaattttgctttagcattttcttcaaaccacgtaaggaggtatctgttttcgcccgctttgaatgatcagtcaatactactccgtccctgcacactagatcatttcctataattacacctacataatcaaattccaaaccttggcatgtgtgtatacaacctatttcattaatagaatcttcatcaattgcccacgtgtctgagttatttaaattccaactcattccgaattgatattcaggaatctcgatatcatgaaattctgttttagctttgccttccttcacccaatcccaacagtaaccagcaactattcgagctttattattaactttattcagatcttctatctgtttacgcaattcatttggatttctatatatacgaaaatcgtagttcattccaatataattagaattcgcagtttcccgaatttgaagaacatcatctaaccagcttatataaccatctgaaccattgcaacgaaactgtgaatccagtttcatatttgtaacctgagcatctaattcttttgagaatttaaggattgtatcagtgctaccaatatcttttaatgttactctttgatgttcgtctatgaaaaaaacagaaagtttggaagcatttattatttccttaatttgattttccccaaggttattaaataaaccggatttctcatttaatcgatgcgcctcatcaacaattaaaacgtcaaattcacctgatggagcattgacataactgcccgatcctttaaataaattatcaatgtgccctttccgaaagttttgttttaacttagtagcatatatatttctgggagctgcattttttgttacatattgtgccacaagacttcggtttgttgcttctactaataaatttatagcaagaacagattttcctgtacctggtccgccttctacaattaatacttttttagtgtttgtacgtaatgcctcattcgccaaatgtaaagccgtctcatacacaactttttgattatcaatcatcataaattctcgattaccttgaagcatactgtttaacgaatcttgaagagactttgaaggccttattcttcctttatctattgtatataggatttctttgttgtctccatacttaatatactttttaatgaaatcacgaagcttacctgaatcacctttgataaaaacaggagcttcttttatataatattcatatattgaatcagttaatggatcgtctgtaccctgattcaagtagttatgtaagtatgcacaaggatatagcttgatatcttctttttgcgcattttcattgtaatcctttattaacgaagcgtatgaccaggcttgataggatgggtgggttgtttcgcgaattcctttatttataaacgttttaacgatggcctctttactatcaattttctctactttctcccattgtttaagttccacaatcacaacagatgaacgatcatccttatctgatccagatataagaaaatcaatacgctttgaagtatggggtattttgaactcaatagcaattcctgcgtccttaggaatttctctatcacttaataccctatacatatactgcatagagttatcccaagatctaacctctttctcattgattttgccaatcttatcattatagtttttacagatattcgtcaccaaattgtcgtcaaacacatcactcagaaactcttcttttgtagcttcatagactatcattgtttcaccttttcattaactttttgcgttatctctataaattcgccgctcaaaataactaaattgagctatattgagaataccatttttcttcaaattaatctgttttaatatgacctttgtacttaataattaaaaaggatccttcacatattaatataaaaagcagcgttctccaaaagagaacactgctttatttcaatactagctttgccacacactccacatgattcgtatgcgggaacatatccaccggctgcacttcgagcgtctgatacccgccatcctcaagcacccgcaggtctcttgcaagcgtgcctggattgcaggacacatacaccacccgcttcggtttcatgtcgatgattgtccgcaggagggcttcgtcgcagccttttcttggcgggtcgacgacgagcgtatcggccgtgatgccttcttcataccatttcggaatgacggtttccgcttctccgactgcgaattccgcgtttgtgatgccgttcagctcagcgttgcgtttcgcatcctcgatggcttccggcacgatttcgacgccgtacacttttttcgcctgcttcgccagaaatagagaaatggtaccgatgccgcagtaggcgtcgatgacggtttcttctccttgcagctctgcgtactcaagcgctttgtcgtagagcacttttgtctgttccgggttgacctgatagaacgatctggcggagatggcgaatttgacgtctccgatgaggtcgtagatgtattcttcgccccagatgacgtttgtttcgtccccaaaaatgacgtttgttttatttgggttgatgttttgcacgatcgatttgacgtgcgggaattgcgccgtaatgtctttgatgatcttcgctttgtgcggaaaatcgcttgttcttgtgatgaagacgatcatcatttcgcccgtgacgacgccgtatctgaccatgatgtggcgaagccagcctttgtggcgttcttcgttataggctttgacaccgtatgctgcacagatgtctttgacggcttggacggcttcatcgtttttggattgctgaatcaggcaggcgctcatgtcgatgatgtcatggcttctttgctgatagaatccggcgacgagtccgccttctctttctcctaccggcacctgcgctttgtttctgtagttccacgggtcttccatgccgagcgtcgggtgcacggtgacgtttgagaggtccagcttgccgatccgttctaagacgtctttgacttgtttctgtttaaacaagagctggccttcataggtcatgtgctgaagctggcagccgccgcattgcttgtagatcgggcacggggcatccgttctgtgcgggctttcttccttcagctcgatcaaacggccgaaagcgaagccttttttgacgcgtgtcactttaatttgcgctttttcctcaggcagggcgttcggcacgaagatcgggaagccctgaacctttgcgacgcccgctccttcatgcgtcaaatcctcaaatgtcacgtcatagtattcatttttttctatcgggggtttcattttcatctataatcacctctcgttttaccaaaagccttgtttcagcgtgctggcaaaccttcaaattcaatgtcagccttcaaaggtttccgatcacgctgaaaagatgacaaaatcctaaaacgaatactgttttaggattttgtccgcgtattagtcatccagctgttccgctttctccttcggcatgatgacgtgaatatgccggtacagattcacgaattcgcccggcagcatgccgccgtattcgccgtccaggttcagctgcatcttttctgatacattgactttcacacggttcgcttttgtgtaaataatgtgctgatcgttaatatgatcgcctctgagcgccatgctcgcgactctgataaactccgcgagattggcttttttcaaaataattaaatcaaacatgccgtcattcaggctggaatcaggggccagcttctcgaatccgccgaccgagttggtcagcgtcactaaaaacagcataatttcgccttgaaacagcttgccgtcatattcaatctcgacttctgtcggtcgaagtgaaggcaacatttccattccctttaaataataagcaagctggccgagcatcgttttcagtttgcttggcacatcgtacgtcagctccgtcagacggcctccgccggcgatgttgataaaatactgaccattcacctgtccgatgtcgatcgggcgggccacgccgttaatgacggtatcagcggcattcagtatattctctctcggaatgcccagcgctctggcgaaatcatttgtcgtgccgaccggaatgatgccgagtgtcgggcgtttgtctaacggcgcaagaccgttgacgacttcattaatcgttccgtctccgccggctgcgacaatcaggtcaaactcccgcaaagcggcttctgttgcggcgtgggtggcatcccccgcgcatgtggtggcatgggtggaggtttcataaccggcttgttcaaatttttgcaggacctgggcaagatttttcttgaaaagctcccgtcctgaagtcggattgtatattatgcgtgcacgtttcattatctcatcatcctacttaagagtatccgatccattattaacactaacaacctttaattatactatgacttgagaaaatcgcaacaatatgtacaggaattgccagaagaaaaaaggccccggctccgtttaaggagccaaggcccgctgtcttactcttcttccgttccaggttttttcttacggaatttcgctaatacttcatatacgatcggcacaatcagaagagtcagcagagtcgaactgattaaaccgccgataacggtgacaccgagtcctttagaaatgacctggcttccgccttcaaagcccaatgccaatggaagcagggcgccgattgtcgcgatcgccgtcatcagaatcggacgcaatctcgtagagccggcttccaggagcgcttctctcgtcgataggccttccgcttctttatggatgacgcggtcaattaagacaatcgcgtttgtgacgacgattccgatcagcatcagcataccgatcatggcattcagactgaccgtctctccggatacatacagtccgactaatgcgccgatgactgtaaacggaagcgagaacagaatcgcaaacggcgctaatgctccgccgaacgtgatcacaagaacgaggtatacgatggcgattgcggcaagcatcgctaacccgagtttcgtaaaggaatctgcaatatccgctgatacaccgccggtatcaatcgatacattgtccggcttatccagtttgtcaactttcttttgaacggctgatgacaccttcgtgacgttgtcagaagtgacggttgccgttacgtcagcgtacactttgccgtcgcgtttggaaatggtatcggatgtcgtgccgtttttcactttcgccacatcgccgattttcacttcttggcctgcaggtgatgtgatggttttatcctctaattcttttacactcttatactggtctttttctgttttgatgttgacgtcaagctctttgccgtcttttttcaccgttgtcaaaggagactgtgacgtttgggacatcagggcttgggagatttgcgaagccgtcaggccctgcttgctgagtttctcctggtcagcgacgaacgtgtactcatcatatgtgctggaaaggcctgagttgacgtctttcagatccttctcctttttcatgatgccttcgatgtctttgaccgtgcctttaatatcagactctgaatctccgtacacatagtacgttaattcgttgttgttgcctgacgaactgaaattttgtgatttccattcgccgcggctcgatgtttttttgatttcttttaagacattgtctttttctttgtcaaaatcaggcgtgtcatcctcgtatttcacgtagaacaatgcgccgtttgagcttccgccgagcggactttgcgatcctaaagaatactgaacagtatcgacatgtttgcgtttaagcagcatatcttccgctttttgcgcagctttttcagcttcgcttttcgtttcgcccggttcaggcgtgtatgtgagctgcatcgttttgtccgcttgcgcaggcaggtagctcgcgccgatcagaggtacgaggaacaaactgccgacaagcatcagaaccgcgatgatagatgtaatccatttatggcttaatgaccaattcagcacttttttatagaaattggccaatctgcccggcttatgctctttcgctttaacaggtgcgcctgtgagcgattttttgaataagctgtgcgcaagcatcggcaccagtgtgatcgaaatcaacagtgatgcggcaagcgcgaagacgattgttaaggcaaacggcataaacagttcgccgatctgtccgccgaccatggcaagcggcaggaatacggcaatggttacgatcgttgatgacatgatcggtttaaacatttcttttgtcgcttcacgcaccaattgcttcccgcgtaaaggttcatctttcagcctcatgcggcggtaaatgttttcgatcacgacaatcgagtcgtcgactacccgtccgatggcgaccgtcatcgcaccgagcgtcattatgttcaatgtgacatcaagctgattcagcacaagaagtgcaatcagcagtgacagcgggatggaaacgatagaaatcatcgttgatttaatatctcttaagaataagagaatgatcacgaccgcaaaaatcgcgccgaaaatcgctttgcttaacatcgtatccactgactctgtaatcggctctgccatatcaagagtcgagctgtacttgaaccctttatggtcttttttgtattgattcagttcatctttaatcgcatcggccacttctaccgtgttggcgtcattggcttttacgatattaattccgatgctgtcctttccgttcgtgcgggaaatggattcagcttttttcacatctttaatgtcggcaatgtcagagagcttgactgtcggcacccctgctgacgcgctttgctgtgcctgctgcatagcctgagcgtccgccgcagatgccgcaccggctccgcccgcttgaccttgagcggcagaagaagatgtgaccggaattctcatctctttcagatctttaattgacgtaatatttccgttaacgacaactgatttttctttgttgccgaatgtgtacaatccaagcggcgtattgacgtcagagccttggatcactttcttgacggtatcttcatcaagtccgtactctttcatttttttatctttgaaagagaattccacctgctcttcctgctgtccggaaacttgtacggacgcaacgccctgaatgccttcaagcttaggaacgagagtgttttccacatttttagtcagatcttcaagcgagcttttgccgcttgtcacactgagcgtcaaaatcgggaaagagttgagactgtaacgggaaatgtcaggttttttcgcgtcatcaggaaggctgacactgtccagcgcttcagcgacttcggttttcgccttgtccatatccttgttgtaatcatattcaatcataaccgatgagacgttttcagaggatgtggacgttacgacgctcactccttctaaattctgcaccgcctgctcgatcggttttgtcacgtcatccgcaacttgactcggagcagctccgggataagtcgtatttactgagaggtaaggcatgttgacgtccggtatggattcctgcttcatattcagaccggcatacagccctgctacagtaacgataatcgtcatcagccaaactgcgaatttgttcttcagtacaaagttaataatgtggttcatcatgtcctccgttaatttttattgactgactggtcattctatataatactaaacggtataactcaacatcgtcaactaataaggcagtaaatttttctaaatttttcaggattaaggggaagcacgtcatgaacgaaaaaaaagagaaaatcataaaaacaggcatccatttatttgccaaaaaagggttttcttcaacaaccattcaggaaatcgccggtgaatgcggaatttcaaaaggggccttctatcttcattttaaatcaaaagaagaccttttgctctcagcatgtgagtattacatcggcatgtctatggaagaaataaagaaaatcaaaacagaacatcagcataaatcgcctaaggacgtattccgaaaacaaatcgcttatcaattccaggaatttatggagcacaaggactttatcattctcttgctgagcgaaaaggtcattcctgaaaatcaaaaggtcaaacagtattttcatgaggccaatattcaatttaacatactgtaccgggatgctttgctctccgtttacagagatgccgtcataccgtttatagcggatgcgtccgttatggcgcaaggaatagtgagctcctatattcatttcttgatttttaatgaacatacggcattccggacggaaaacgtggcggcctttctgattgccagaatcgatgacctgattacgggactgataagagacaatcccgatccgctgctgccgcaggatatcttcactcagccggcggcggacagagaaagactgcttgcggatattcaaaagataaaagcacagcaggggctgcctgaggacgtcctcgtatcgcttgaagtcattgaagaggaatacgcaaaggaagagccgcgaaaaccgattattaaaggaatgctgtccaacttggcaggcagcggaaatgagcagattgaaacgctgcgggcttccattgaaacctatttcagcttataaaaaaagagaccggcgcttaccggtctccgtgtcagcagcgcccttagaggcggctgctttttttatcgttttttgatttcttcaagtaagatcttgttgaccatcggcgggttggcctgtccttttgaggctttcataatctgcccgacaaggaagccgatcgcgcggtcttttccgtttttgaagtcttcaattgactgcgggttgctgtcaagcgcatctgttaccagcttcagaagcacgctttcgtcagaaatctgcacgaggcctttttctttaacgattttttctgcgtcgccgcctttttcaattaattctttaaagactttcttcgcgattttggacgagatggttcctttttcaatcagcttaatcatgccggcaaggccttcaggagtcagtgcgacatcctcaagctctttttgttcggcattcaggtaagctgacacttcacccatcagccagtttgatgcctgcttggcttccgcgcctttattgaccgtttcttcgaagaaatcagccatttctttcgtcagcgtcagaaccattgcgtcataggccggcagaccgagctcttcgatataacgcttgcggcgctcgtccggaagctcaggaatggttgctcttacgcgttctttccattcgtcatcaatgtagagctcgacaaggtcaggctcagggaaataacgatagtcgtccgaaccttctttgacacgcatcaaaatggtttttttcgtcgcttcatcgtagcggcgcgtctcctgctgaatgactccgcctgacagaagcacctgctcttggcgtttctcttcatgctcaagtcctttttgcacgaacgcgaaggaattcaggtttttcagctccgtttttgtgccgaatttctcctggccgatcggacggagggaaatgttggcgtcacagcgcagtgaaccttcttccattttacagtcggaaacacctgtgtattggataattgatttcagcttttcgagatatgcgtaagcttcctcaggtgtgcggatatccggctcagatacaatctcgacaagcggcgtgccctggcggttgaagtcaacgagggaatagccgtcgcccgtatgcgtcagttttcccgcatcttcttcaaggtgaagacgggtaatgccgatttttttcgtttttccgccgacttcgatttcaatccagccgttttcgccgatcggcttgtcaaattgagatatttgatatgccttcgggttgtccgggtagaaatagttttttcggtcaaacttcgtatccgttgcgatttcacagttcaaagccattgcggctttcatcgcgaattcgaccgcttctttgttcaaaacgggcagcacgccgggatagccgaggtcgatgacgcttgtttgggtattcgcttccgcgccgaatggcgtcggtgagcttgagaaaattttagattttgtttttaattccacatggacttcaagtccgattaccgtttcaaagttcacttcatttcaccccttacagttcaggtttcgctttatgatgatctgttgcctgctcaaaagcatgagcgacgcggtatacagtgctctcatcgaagtgttttccgatgatttgcagtccgagcggcagtccgtccgcaaatccgcatggcacgctgattcccggcacacccgcgaggttgacagggatcgttaaaatatcgttggcgtacattgtgagcggatcgctggttttttcgccgattttgaatgccggtgtcggcgttgtcggtccgacgatgacatcgtatttctcaaatacgtcttcaaaatcttttttaataagcgtgcgcactttttgcgcttttttgtaatacgcgtcatagtagccggagctgagcgcgaaggtgccgagcatgatgcggcgctttacttcgttgccgaagccttctgagcgtgtctgtttataaaggtcgatcaggttgtccgcattgtctgagcggtagccgtagcggatgccgtcaaagcgcgcaaggtttgcagacgcttcggaagaagaaagcagataatacgttgcaagcgcgtatttgctgtgcggcagagatacttcttcccatgtcgctccgaggtcttcaagcacttttaaagcggctaaaaccgattctttcgcttctttgccgacgccttctccgagatattctttcggcacggcgatttttaagcctttaatatcgccagttaatgaagaaagaaagtccggcacttcgacattggcgctcgtagagtccattttgtccgggcctgaaatcgcctgaagcaggaatgcgttatcttctacgtttcttgtgatcggtccgatctggtcaagtgaagacgcaaaagcgaccaaaccgtaacgtgacacgcgtccgtatgtaggctttaatccgacgacgccgcagaaagaagccggctgacggatggagccgcccgtatcagatccgagtgaaaacggcacttctccggctgcaaccgcagctgcggaaccgccgcttgatccgccgggaaccgtatcgagattccaagggtttttcgtcgctttgtacgcggagttttcagtagaagaacccatcgcgaactcgtccatattcagcttcccgattgtgacggcttcagcggcttgaaggcgttccacaaccgtcgcatcgtaaatcggatcgaagttttcgaggattttgcttgagcatgttgtgcgaagccctttggtcacgatgttgtctttgacgccgatcggcattccgaagagaagaccgtgttcagaccgtccgtcaaccgcttcgtcaagttctttcgcgtaagcgcgggctctttcttcatcaagctgtaaaaacgcctgcaccttatcatccacggatgcgatccgtttgtaagattcatcaacaagatcggaaatcttgatttcttttttatgtatcatttgtttcagttctgtgattttgtgatcaaataatgacatactgtctccctcctttaatccagaatagatggcacacggacatagccgtctttatgatcgggagcatttttcatgacatcctcgaccggaaggcctttacccgcttcatcttctctcattacgtttttcattttcagcacgtgtgttgtcggttccacgttatccgtgtccacttcattaagctcctcggcaaacgagatgatgctgtcaagctgttctgtgaacatttcagcttcttcatccgtaatggcgagtctcgccaaatgagcgacatgctttacttcttctatagaaattcgtgacataagatccacctccgcataattctccgtttcgtcatataatactgatcatatcaaaaacgagccctctaaagcaacaaaacgccgccttctgaggcatgatgaaaccctctctattttatcctaaatcggggagaaagagaaacgaattatatgtcagaaaatttttacttttataatttattggtagcgctttcttctttaagctgttctaggttggcggggattttttccttgagcgggccaggtttcgagagttgattgatcggggatactttgttaggtttagtaaccatagccggcactaaatcatgcgatccccatcgaaagatgactaaaggcaggctggatcgccggcactactaatctacagaggtgatgcaacatttacatgaaagaagagagggtccaaaaacgtgagtattgaattaattatatctcttggcatttactttgccgccatgctgttaatcggctggtacgcattcagaaagacaacgaatattaatgattacatgctgggcggaagaggactcggtccgttcgtaacggcgctgtccgcaggtgcggcggatatgagcgcatggatgctgatgggagttcccggcgcaatgttcgcaacggggttatcgaccttatggctggcgctcggtttgacgatcggcgcgtattcaaattatctgctgcttgctccgaggctgcgcgcttacacggaagttgcggatgatgcgattacgattcccgattttttcgataaacgattccgccactcgtcatcattgctgaaaattgtttccgccgtgattattatgatctttttcacactgtacacatcgtccgggatggtatccggaggcaggttatttgaatcggcattcggcgccgactacaaattcggtttgtttttaacggcgggtgtagttgtgctttatacgctgtttggcggtttcctcgctgtcagtctgactgactttgtacagggagcgatcatgtttgcggcattagtgcttgtgccgatcgttgcttttacccagctcgggagcgtttcaacgacgattgattcgatcaacgccgttaacccgaaactattggatatctttaaaggcgcgagcgtcattagcattatttcttatttggcatggggactcggctattacggccagcctcatatcatcgtacgatttatggcgattaaagaagtgaaagatttaaaacccgcccgcagaatcgggatgagctggatgtttatttcagttgtcggctcattgctgaccgggattatcggggttgcgtattctcatcacttcggggtctccgtaaaagatccggaaacgattttcattattttttctaaaatcttgttccatccgctgattacgggcttcttgctgtccgcgattttagcggcgatcatgagttccatttcctcacagcttctcgtaacggcaagcgccattacggaagatttataccgcgcctttttcagacgggaagcgagcgataaagaattggtcatgaccggacgcctgtcggtattgatcgtggccgttatcgccatcctgctttccatgaatccgaacagcaccattcttgatctggtcggatatgcgtgggctggcttcggttcggctatcggccccgcgctcttgctcagtctgtactggaaacggatgaatgaatggggagcgcttgcggcgatgattaccggggccgcggccgttttaatctggattacgacagggcttgccgcttcaaccggcgtatacgaaatcattccggggttcttcctcagtctgattgccggtattgccgtcagcctgctgaccaaaaaaccggccgatgcttcttatcagctgttcagccggatggaagctcttttgaaaaacaagaaatagacaaaaagccgtcagattttatccctgacggcttttttcttccgcacttgtcctgctataaatactgtgagaaaatcatatcaatttattataagaaaaattgcggaggtgctgtgcaaattgagctggcctatcgaaccagacattttattaaagctgggcattgccacgctgatcggcatgatcatcggtcttgaacgcgaactgaaaaacaaaccgctcggactgaaaacctgtattgtcatcgccgtcagctcctgtatgctgacgatcgtcagcattaatgcagcatatcatttcccgaaatattaccgtatcatgatggatccgctccgccttcccgcccaaatcatttccggcgtcggttttatcggcgcgggcgtgatcctgcgtaaaagcaatgacgtcatatccggcctgacgacatcggctatcatctggggcgcggccgggctgggtctggctacaggcgccggcttttataaagaggcgttcgcaagcctcttgtttatcctgatcagtgtcgaatttcttccgtggctgatcagaaaaatcggtcccaatcgcttgaaggaaaaggatatccgcgtgagaatgtctctttccgataaagacaaaatgaccgagattttaaaggaaatgaaaagcaaacagctccgcattcactccgtccggattgatgacctgggtgaaaaagaatttccgattatggaagtgaaagtcagtgttcataaaaaccgctacaccactgacgtctattatgatattaaagaaattcagggcgtcgtcggagtaaaatgtgatacgttataaaaaacgccgggctggattcagccggcgtttttctatttatacgaatgcagaaaattgatactccgtaatcggtgtttcattttcgatatcgcgcctgaaggctttcagcatcccgagttcctcgtccccgagtgaattgaggtcaaacgcctgatgcaataatccgtagatcagcatatggcgcagccggaggaaatccgggatgtgttcaaaccatgcggaatcaaggtcattttcttccctgtagcctttcataaagtgagtcatgaattcacccgtaaacgcggccttgtcttcatacgggatgaccggataccacaacatgttgtacagcagaatactgatatcattcacaaaccaattgtagccgatatcatcaaaatcaaatgcagtgatttttccgttgtcccaattaaaattgccatgatgcagatcggcgtgcacaaggccgtagttttcaggattcttcggcaaacggcgcagtttttccattagagcatccgcccgctcaaatacgagatgctgatctgcgggcacgtattttctcagcttcagctgctcctcttcatcccattcctgccttttatatgccggatcgctcagacggtagcttttcgtcagccggtgcatgttccccgtgtactttccaagctggtaaaacagagttccgttccagtctgattcctccactttgcgtccgggcgctttttcatagactcttaataaaaacgctccgccttttccgtccggcacttcttcgacatctttgccatttaatgaaggaatcggctttgctactgaaagcccttcctttgccagatgatgaagccattccatttctccgagaatatattccggcgttcttctgatcgtatgcgtaatttttaagatatacggttcgttatctttcacaatttcatatacgtagttctctgcgtccgcaataaattgaaacttggtaaatccgtatatttcaccggcttcagccagcaccttatcttcctcaaaaatcgctttaatatctttatgcatgctgattcacccttttcataacatttgtaggcggtgtgtgtactcagcaaatgtcattcatcaacattcctgcccttcttttttcacagcagattcgtaacatccgcttagaaatgatatgtgttttcctgttaattcctaattatacaaatatcttaacatacctcattcctctctccaacgatattcacactaaaaaacccttgctcatacagaaatgaacaagggcatcttggttaatcgtaaatatggacggtcggttctttgtcacccgcattgcggacgatcagcgcttcctgcccgtcagacgaggtaatgttaatttcgacatcaactgagccttttgaataataatccatcagctcacctgttaagtattgggtgaaggcgatgacttcacttttcccgtaaaattgcatcgggatttcaatcttcatttttctcatttcatcgttttcgtacattgccgttccgacaactccggtgtaattcgggaagtagctgtcgatggcgtttttgaagcgtttaaacacttcggaatcatcagggtatttctttgccgtgtctgtatccgccggatagaagacgtacttttctttgacatcatcccagtttgaaatggtggatgagccggccttgacttctgttttcgcaatgtaattccccggtacgattgatgttttcggcgcttgtttataaagggcgacggtaatcggcacatttttcaggttatccattttccgaaggcggttaacgacttcctgtgcgatttcttcgccgtggctgcggatcgttttgtcgctgagctccacttcctgctgcggatcacctgtgttttcgcggtaatagtatacagagttgagagcgagaccgatcatgacaccgccaagctggatggaatttttatcttttcttactaagtaatcctgctcaagcatggacgctaagtaaatcgggctgttttcgtttttctcttttgctgatcccgagcttggcagcaccgggtttaagccgagattctggaaattggcgtctgcctttttcgcctttttcagatcactgccctcttttttgcggtcaagccagctgagaaccgtgtcctcatctaaatactggccttcctgatacaaatagtcatccgtcgggaacgtgtcttgagcgagccgcatcagcccagtctcgaattcatcgatgtccagcctcgtgttcagccggtccgcggtcaggccgcgcgcttttccggccttaaacgggagcaccattttatagtaggaatcagagatattatatttcggtatgatcgctttttcagaagactttgccgttttctgcgtgatctcttcctctttttttcccccgaaactcggcgaacaggccgacagcatgagtactgccgccgttgccgtcgccgccaatgccaacatctttttcaatagaaaacactcctcttatttctttagctctcccaatagctgtgcttcattccatacttcaatgtttaattcctgcgcttttgtcagcttgcttccggccgcttctccggcaatcagcaagtctgtttttttgctgacagatcccgtcagctttccgccgagcgcttcaatctgcgccttggcttcatttctggacagctcttcaagctttccggttaacacgatggttttgccggcaaaataagagtcgctgtcctctgcttttacttttttcgggcctttgtagagtgtgttcacaccgagttcctcaagttcattcaaaagctcaagcatttcctctttgcggaaataggtgataacggcatcggccatcttttcgccgatttcatctaccgcaagcagctcttcttccgtggcttgtttcagattttccaggctttcaaaatgcatggccagtgttttggccgcttttgagccgataaaacggatgccgagaccgaacagcaggcgttccagcgaattctctttcgacttttggatggagctgatcagattgtcagttgatttttcccccatccgctcaagccggatgacctgttctttcgtcagcttatacaaatcagcgacattacggacgagatgttcacggaaaagctgtgtgatgacacgttctccgagtccgtcaatattcatcgcgttgcgtgagacaaagtgaatcaggccttctctgatctgcgccggacattccggattgatgcagcgcagcgcgacttccccttcaatgcggacaagttcgctttcgcactcagggcagctggtcggcatattgaattctttttcttccccggtccgctgttcaattaagacattgacgacctcagggatgatgtcgcccgcttttttgacgaccactttatcgagaatgcggatatccttctctttaattaaatcttcgttatgaagggatgctcttgagaccgtcgttcccgcgacttttaccggttccagaacggcggtcggcgtaataacgcccgttcttccaacattcagttcgatatcgagcagttttgtcacgacctcttcagccgggaatttgtaagcaatcgcccagcgcgggctttttgccgtatacccgagttcttcctgctggtcgagcgaatcgactttgatgacgattccgtcaatttcataagggagatcggcccgcttcgcctgcagctcttcgatcatttcaatgacttcatctatcgtgtcgcattttttccgttcctggtttgttttaaaaccgagctcatccagaaaatccaggccctgactctgtgtttccacacccatctcgtcaagctccgctatactgtagacgaagatgtcaagatttcgtttcgctgcaattttcggatcgagctgtctgagtgagcccgcagccgcgttccggggattggcgaacggctcctcttcatgtttcagcctttcctcattgagcgcttcaaatgactgtttcggcatgtacgcctctccgcgcacttctatggaaagattacgtttcattttcagcggaatgttgcggatcgtttttaagttttcggtgatatcttcgcccgtcgttccgtctcctcttgtcgcgcctctgacgaaatagccgtcttcataacggagagaaacagcaagaccgtctattttcagctccacattgtaagcgacgccgtcaccgacagcctgacggacgcggcggtcaaaatcgcggagatcatcatcgttaaatgcgttgccgagactgagcatcggcgtgccgtgctgcaccttttgaaaagattcaagcaccgctcccccgacccgctgtgtgggcgaatcaggcgttctgagttccgggtgctcttcctctatggcaatcagctcctgcatcagtctgtcgtactcggaatccggcacgctcggttcatctaaggtgtaatattcataactgtactgatcgatggtgcggcgcaattcttctgcccggtgtttcgctgtttctttgtccatcatgttcttcctttcctcttcaggttactgcttttcaatcggcgcaaaagcggcaagcagacgcttcacgccgactgggctcgggaatgcgatatcaagctcggtgctttcgccttctccttttacgctgacaaccgttccggtgccccattttttatggcccgctttatcgccgaccgcccagctgagcgagtcgccgcctgttttgttcgcataggaaacgggacgggatacgggcccgcgtttcggctgcacttttcttcccggctgcatgcgaggtgttttcttctcatttaggttctccaataaatcgccaggtatttccctgataaagcgggattccggattcatattggtgcggccgaataaggttcgcattttggcattcgttaaatacagttcttcttccgccctcgtaatgcctacatatgcgagcctgcgttcttcttccatctcggcttcttccatcagggagcggctgtgcgggaacacgccttcttccatgcccattaagaacacgactggaaattcaagccccttagcggcgtgcagtgtcattaaagtgacggcatcctttccgcctgcttcttcttccttctggtcgagctggtcaatatccgcgatcagcgccagatcggtcagaaacgcgacgagagacttgtcttcgcttttttgttcgaagtttttcgtcacggaaagaaactcgtcgatattttcaaggcggctttgggcttcgattgatttttcggccttcagcatttctctgtattccgttttttcgagaatttcttccgtgagttccgtaatggacaggtaatcctgcatgttcgtcagattttcaatcatcgcgccaaagccgtcaagcgcgtttgccgctttcgcgctgacaccgatgaaatcaacctgtttgatcgcctggaacattgacattccgttcatcgccgcatatgaagcgattttttctagcgaagtggcgccgacgccacgcttcggcacattgacgatccgcgtaaaactgatgtcgtcgtccgggtttgacacaaggcgcaggtatgcaagaatgtctttaatttctttcctgtcgtagaacttggttccgccgacgatattgtagttcagaccggattttaaaagggtttcctcgatgacgcgcgactgggcgtttgtccggtataaaatcgcgatatcggaaagcttccgccggcccgagctgtgcagctcataaattttgcccgcgacgaattggccttcgccgaattcattgtcgccgctgtaataagaaagcttgatgccttcgtcattttccgtccacaggtttttcggcttgcggtttgagttgtttttgatcacttcgttagccgcctgcagaatccgctttgttgagcggtagttttgctcgagcagaatcacgtttgcgctcgggtaatctttttcaaaggaaaggatattcgcgatatccgccccgcgccatctgtaaatggactggtcggagtcaccgacgacgcagatattttcaagacgggccgcaagctgcttcacaaggaggtattgcgccctgttcgtatcctgatactcgtctacgtgaatgtactggaatttgcgctgataaaactcaagcacttccggcacacgctcaaaaagcttaatcgtcgtcatgattaaatcatcaaaatcgagcgattggtttttcagcagttttttctgataatcggtatacacgtcactcgtgacctgatcgtagtagccgccggccgtttttgcgaattcctcaggttcgatcagctcgtttttggcgctgctgatggagcctaaaatacttctcggatcaaactttttcggatcgatattccgctctttcaaaatccctttaataacggaaagctgatcagccgtatcaagaatggagaagtttcggttgatgccgattctgtcaatatccctgcgcagaatccgcacgcacatgctgtggaaggtggaaatccagatttcatccgcgccgggtccgagaatgctctccacccgctccttcatttctctggcggctttatttgtaaaggtaatcgccagaatgttccatggcgccacgtgtttttccgccattaagtatgcgattctgtgcgtcagcacacgtgtttttccgcttcccgcgcccgccatcagaagcagcggaccgtccgtcgtcttgaccgcttcctgctgaacgggatttaatccgcttaataattgattgctaatgtaattcatatccgttcaccgcctatcaaacatatgttctatcataaatcaatttcgtccgcttggctactttgtctttacagccgccaccgttttgagcgcctgatcaaaatcttcatatacggcatttccgacaacgatgacatcggcatgacggccgaaccgttccgccgtttccgcgtctttaatgccgcctccgtaaaacaggacggacttgtccagcacagccttcgttttctccaccgtttctatgtccgccagcatcccgctgtattccagataaaaaatcgggagatgaagcaaatgttccgcgacccgcgcataggcgagaatatcttctgtttctatatgtgtatccgcctccgtcaaagcggccgccttacaatcagggttgacgatgcagtagccctccgtcacgatttcctccattgacatgagctctccgtattctttcatcgcctgatgatgcatgccgacaatccagtccgcctttttgctgttgagcacactcggaatgaaataaagatcaaacccgggcacaatggaatcaatcgtcgacacctcaagtacgcacggcactaaaaaccgccgcacctttgacatcagtctcagcacattgtcctcggtgatattgtcgcttcctccgatcacaatggcgtcagtccctgattcacaaagccgttccagctgttcatccggtaaatctttattcggatcgagtttaaaaacatgcttccactcgttaacatcgtacatgcgttttcgttcctccattcgtttcttgccatttaaacattataacaaattcgtttggcccggaaaaacggaaaaagacgtcattcacctgattcacaaaaaaagattgcgctccgccggacgggaaacggctatgtttgaaaacagacaaaatgtggaatgtcaaagagaaaaaaggcaaggagtctgatctcaatggaacaagccattatcgtactgatttgtatattgatttttattattttagttcccgccgcattgtttctctggatttacataagagacgaaaagcaggaagaacattcagtgctgcgcaattatcccgcagcgggaaaactgcgctatatatttgaaaaaatcggacctgagctgcggcagtatttattcagcaatgataacgaagaacagccgttttcccggagagaatatgaacagacggtcatgtcgggaaagtataaaagcagaatgatgggcttcggctcagaacgggatttcgatcagccgggctattatatccgtaacgccctcttcccgaaacaaagggaggagctgcgcacagatcagacgccgaagatcgacacgatggtatacaagattgacaaagacaacctgctgaaacgcagcgaacaccgcgaaaaagcaaaagcggacccttattacctgcatccggacgatgtgcaagtgatcggccgcgacacatgcaagaaaccgttttatgtaaaagggttaatcggacaatcagcgatgagctacggctcacttggcgaccgggcaatcaccgccctgtcaaaagggctgcaccaggccggcggcacatggatgaatacaggcgaaggcggcctgtctgagtatcacttgaaaggcggcgcggatattatctgccaaatcggccccgggctgttcggcgtgcgcactgaagatggagaattttcatgggaagaatttaagaaaaaaagccgcctcgagcagattaaagcctttgaattaaagcttgcgcaaggggcgaaagctagaggcggtcatattgacggttcaaaggtgaccgaagaaattgccgccatcagaaatgtgcagcccggacaatccattgacagtccaaaccgcttcaacgagttctcaaatgttccggacatgcttgatttcattgagaaattaagaactgtcggtgaaaaaccggtcggcatcaaaattgtcccgggcagccgcaaagaccttgaagaccttatttcctgtatgagttcatcaggcaaacttcccgactttattacgattgacggcagtgaagggggaacgggagcttctttccatgagctggcggattccgtcggcctgccgattctgaccggcctcccccttgttgacggccttttgaagacatacggtataagagataggctgaaaattttcgcatccggaaagctgctcactcccgataagattgccgttgccctcgcgttaggcgcggattttgtcaatattgcccggggaatgatgttttcagtcggctgtatccgcgctcaagtatgccacaccaatcattgtcctgtcggagtggcgacaaccgatccaaaacttcagcgcgcgctcagtatcgaggataaacagcatcgcgtctgcaactacgtgctctcgttgcgtgaagggctgtttcatcttgccgcggcggcgggtatcagctcgccgattcatttctcagctgaacacatcgtataccgggaggaagacggaagcctgagggaacttcccggccttttgaatcagcacgcataaaaaaaccgcctgccgtcatcggcagagcggttttttacgtagctgaggaggattctcctttgtttacgcggtcaagcgccatttcataggcgtcgttcccgtaatttaagcagcgcttcacccgggaaatcgtcgctgtggaagcacccgtttcgctttcaattttgtgatacgtatttccttcgcggagcattctcgccacttccaaacgctgcgccagcgattggatttcattaatcgtacaaagatcgtcaaagaaacgatagcattcctccagatctttcagcgataaaatagataaaaataactggtccagttcttttccgcgtaatttatcgatttgcatcgtcaaacaccttctcctttactaatggaagctgcatcgagatcaggcacgatattaatccatgtctttcctggcacaaacggaagaatctcaccgccttttacgggcagaatacggccgtctttatattcccagtctgactccataacatcgccgtgctgaagcaggaggcccttcccccctgactgaatatcgatggcccgccttccatctttgtctgtcatgcgatggccggcttcaacaataaaaatgttgtgcatggctaaaggctttccggtctcccggtctgtcgctttcacaccatcagagcttcttgtataagcatcagcttttttatcataatcgtattcgacaagatttgtaacgttttgtgttccataatctatccgaatattgtaggtttcgtttccgggttttgcatctgatgtctgaaatgggagcggttctgtttttccgttcagcttgtatcctttttgttccgccgccttcctgatattgtcatacgacgtgtaggaattgtggggcggcttgctgaaatcggctctccaaaacaggctgccgtcaaaatccaaaccgtttatataatcgtaagttccggactccagctgctttttagcgccgggactccagccatgatggacaaatatgctgttaaacccgctgctgagcgtgacaaaatattccctcgcgctccgcacaggcccgaccgtttccggcatctcactttgaaaaatcgcgagaaaccgcgtaatccggccctccgcgagcgcttcgatgacaacatccgcctttgacagcccggattggggcctcgccttcggatgattgttcactgcgactgcaatcggacggcgttctgcaagcttctgctcagttttcagccccgttaaaggagcttccgcttctttcggctgcacctgatcggcattgttctgccggcaggcggcaagcagcaaaaacgcaaaacaaagcatacaaacggttttccatcttttcatatgtcggctccctgcttttatattttaacgcattatcgatggaaagagtacagtttttttcatcacgtcgaatattcctctcggcgtaatgcggatataaggcaggtgtgtgctctgcaaaaagagcagcgtatagatcggatcgcagaatcggtagccccgctcctccagcagcgtcctcagtttttgctctttctcaagcacttcttcataattctccgcggatgcagaaccgtttaaagcgaggggaatctcatgaagaaccttcccgttttcggcaagcacgattccgccgccgatttctttcatccgtgagaaagcgagcaggatatcttctttattttttccggcagcgataatatctccggttgtcgtgtaggaactgacaaagccctgcacccgatcggcaaaacctttcagcattgtattgacccgccattttccatgcttatcgagaagcgtgagatagcattcatcatgatcaaaagaaagctggtcaacagaattatcaatcgcaatcatatacggctccataatgacggcgttgcgcattatcacacccatcggcattgaaaactgtaaatcatccatcgtcatatcatatgaaagctcaagagggacaagaccgccctttttccaatccgtttctgtaaacgcattcatatttcggccgtcttccctcagcaggatgcctttggagatcaccgtgaccgggtccggattcatcgggtcatcgagaatgttcaatgaagcaagccggcccggaccgatcacaccgagaaagtcatccatctgataatatttcgcgatattaaaggaggccatattgtaggcgtcaatcgccggaaccccttcctccaaagcgattttgattaattcattcgtcatgccgcctttataaaaatgcggcgtcgctccatccgtcgtgtaaaagaaatgatcataatgccggaagcctttttgatggagatcctgcaaaatcgttctcaaatcagggcggatggatgaatgtctgagcgaaacatagtaacccaattcaagccgtctcatcacctcgtcgccattcatcgcctcgtggtcagaatcagccccgaacagtttcatcttcgtcagtgttttttcagaagctccgggaaaatgcccttctatccgcttgcgcagtttctttgtcgcctgcatgcaatgaagcatcaagtcatcgccgtccatgaggcgcggccatccggtcaattctccgccttgaatgacatccggatgctcaatccattgcttgcggacatcaaaagaaaggagctggtcctcattcagcacttcagtctgcagatcatatctggaccaccagaaatattgcaccggctgtttttttagttcttccaatatagtaagcgctttctttttaccgctgtgcaaaagaaaaaacaagttatcattaacaaacgtcgttgttccgaattgagacacatattcggcgagcgtttggggattatatatttgaaaaggatgtgtatgcggttcaatgtaacctggcacaatgtattttccttcacaatttatggtatgaatgtgctctgctgcatcaggaagctcatgaccaacatatacaattcggtctccgtaaatccagacgttctttttcagccattgttttaaaaaaggatttaatacgagagcatcccgtaaaagtagcgttggaagcagctttgagtctacaacatccgcctgtgatctgatgtctttatttttccagttaaaggtacgttcggacattcacatactctccttcgcttatattagacccatcgtatcacatccgcacaattatcgcacggctaaaacgttacaaattattgaagatgaatgaaaaactttttctaagggagctgaaatgatgaaaccgaatatcagtttattaaacgccgttatgcgcatcacttgcggcctcaccattttgtctgccgcttcagcaaaatacacgagaaaaccttggtgcaagatgcatctcttctgtatgatgatgggcgcgatgaaagcggcgtccggcatcctccgcttctgtccggtgacatatatgttccaagccggaatgaatcaggatgacagccatcagcaagaaaaataacaagccgtttcggcttgttatttttttctcctgtcccgcgagtatgagaagaatctgccggcgatcccggcatcacaaaagccgggacagaattcaagactgcatgacaatcttagtcgtcattcagaagaaaacccgcatcttttaagacgcgggggtttcctctttatcgctgcgatgctttcagcgcacgggcgccgatatcgcttctgtaaaacagtccgggttttgtcagccccgaaacggcgctgtacactttatccctcgccgcttcaaatgtctcagcaaatgccgtgacattggcgacccggccgccgttcgtaacaaattgtccgccgtcttttttcgttccggcatgaaaaacggcgatcccgtcttcagcggacgtcaaactgccgatcggcgtccctttcgcatagccttccggatagccttcagaagccaggacaacgctgaccgcggccgtatccttccatcttaggtcaacatctttctcatgcagaagatctaagagcacctgaatgaggtccgattccattctcggcacgacggcctgtgtttccggatctccgaagcgcgcgttgaattcaatgacctttgatccgtcttccgtcagaatcagccccgcgtacagcacgcccgtgaaggagcgcccctctttcaccattgcttttgccgccggcttcacaatcgtttcgactgcgcttctgacgatatcatcggaaatgtgcggcaccggtgagtaggctcccattccgcccgtattcggccctttgtctccatcgaaggcgcgtttatgatcttgagcgatgaccatcggatagacggtctccccttttacaaacgccattaaagaaaattcttcgccggcgagaaactcttcaatgacaacagatgcgctcgcctccccgaatttctcatcctcaagaaaatcgtgcaggcattcaatcgcttcttcttccgtcatcgcgactgtgacaccttttccggcggcaagcccgtccgctttaatgacaatcggcgcgcctttttgctgtacatatgctttcgcctcttcaaatgaagtaaacgtctcgtactccgccgtcggaatgccgtattttttcattaaatccttggcaaactgtttgcttccttcaataatagccgctttttcagacggtccgaaaacaagcagtccggctttttcaaactcgtcggctatcccttcaatcagaggaacttcggggccgataatcgtcaggccgacatgatgttctttcgcaaacgcaatgagtgcggcatgatcgctttctccaatgttgaccagcgtcgcgcagtctgtcataccgtcatttccgggcgcggcgtacaccgtgtcaacaagcgggctttgcgccgctttccaagccaatgtatgctctctgccgccttttccgataatcaatacattcacgcttcgttccccccttaatgtttgaaatgtctgatgccggtgaataccatggcgattccgtattcatccgctttcttaatcgaatcttcatcgcggaccgatccgccgggctggataatcgccgtgacaccggcttttgcggcttcttcgactgtatccggcatcgggaaaaacgcgtctgatccgagcgcgctgccttttgctttttctccggcctgctcaatggcgattttggctgaaccgacgcgattcatctgtcctgcgcccacaccgaccgtcatatggtcttttgcaaggacgatcgcgttggatttcacatgtttgacgactttccaggccagcttcaaatcttcccattcctgctcgctcggctctctttttgtcgggatggtgatgtcggcgtcatcaaatccatggacgtctaaatcttgaatcaaaagaccgccctgtacggaagtcagctgtttttctttctttcctgatgcggtcacgtcaagcgtgagcagacgaaggtttttcttcgccgtcagcacgttcagcgcttcttcactgaaagaaggggcgataatgatttctaaaaagatgccgtgaagggcttcagccgttgcctgatcaacttcacggttcagcgcgatgatgccgccgaaaatggaggttttatcagcttcatacgctttattgaatgcttcctcaattgaagctcccgtaccgactccgcatggattcatatgtttaacggcaacagctgcgggttctgtaaattcccggacgatttgaacagccgcatccgcgtccttaatattgttataagaaagctctttgccgtgaagctgttttgccgctgcgatggaaccggagacaggaagtgcgctttggtagaaaaccgcctcttggtgagggttttcaccgtagcggagcgactgttttttctcaaaagtaacagtgaattgctcagggtctttctcaccggcctcgcgtgttaagtaatcagcgattaatgcgtcgtatgccgcggtatggcggaatactttggccgcaagctcgcgttttcttttgagcgaaacgccgccgtgttctttcatctcattgagcacggagctgtaatcggccggatctgtgatgaccgtcacatcctgatggtttttcgatgcggcgcgcagcatgccgggaccgccgatatcaatgttttctatcgcttcatcgtatgttacgtcttcttttgaaatcgtttctttaaacggataaaggttgacgaccacaaggtcaatcggtgcaatgccgtgttcattgatctgcgccatatgctctttattgtctcttacggcaagcagaccgccgtgaatattaggatggagtgtttttaaccgtccgtccataatttcaggaaatccggtcacttctgaaatgccgatgacatccacaccgttttcctgaagaagtttttttgttcctccggtcgaaatgacttcgacgccgagctctgtcagttcctttacgaaaggtacgagatttgttttatcagaaacactgattagtgcgcgtttgattgtcatgccttttcacctctgttatttagtcccagcagccgtttcacaacgctcggataccatttgtgctcaagctcgtgtattgtatgctctatgtcttcaagcgtatcgttttcctgtatttcgaatgctttttgcgcgataatcggtccggtgtccatgccttcgtcgacgtaatgaacggtaatgcccgccactttcacaccggcccgatacgcctgtccgacagcgtcaatcccagggaatgccggaagaagcgagggatgtatattaataatgcgtcctccgtatgcttcaagcagcgtatctccaatcagtctcatatagccggcgagaacgattaattccgccccgtgcaggcgcagctgttcaataatggcccgttcaaaggccgctttgttttcaaaagatgacggttcaaaggcgaatgacgggatatgtaaagcctccgccctttccgccgcctttgcctgaggcttatccgtcacgagaagcgagagctccgcatcccacttctcttctctcatgcgtttggcaatggcctcgaagttcgatccgtttcctgaagcaaataccgcaaactttttcatgaaagagccgcaccgccgaaagaaatgccttcgccccgcttgacccggccgatcagataagccttctcgccctgagcttcaagcgtgccgatgacgtctgtcaggttttcttctttaacggcaaggacaaaaccgatgcccatattaaagacattgaacatttcttcttctttcagcttgccgtgctcctgcagaaacggaaaaatcggcgggatcggccatgatccgtgatcaatttccgcgctcaatccgtccggcagcatccgcgggatattctcgatgaatcctccgcctgtcacatgcgccatgccgtccaccttaccgcttttcaccgccttgagcaccggcttcacatatattctcgtcggttccagcaattcttcgccgagaggacgcgcaaacggttcatagacagtatccaaatcaagtccgccgtcatcaagaagcacttttctcaccagggaaaatccgttgctgtgaaggccgcttgaagtaagtccgattaagagatgcccctcttcgatatgttcaccggtgacgatttcgtctttttccgcgacgccgactgaaaagcccgcaatatcgtattcatcagacgtatacagccccggcatttccgccgtctcaccgccgataagcgctgatcctgactgctcgcatccgtccgccacaccctgaacgatctgctcaattttcaccggatcagccttgccgaccgccaaataatcaaggaaaaacagcggctccgctccctgggcaagcacatcgtttacacacatcgcgaccgcatcgacgccgatcgtgtcatgcttatccattgaaaatgcgagtttcagtttggtgccgacaccgtctgttccggaaattaaaacaggcttttgatacggaagctctgacagatcaaacattccgccaaaaccgcccaggcttcccataacgccgagccttttcgtgcgctccacgtgttttttcattcgtttgacggcttcgtatccggcttcgatgtcaactccggcatttttataagcatcagacatccctatcactccttgtcaattcgtttctcctaaaaaggcagaaagagaaaggcagcctgaattcccgctgcctttatgtcattttcacattttattttgtcagcaccgcttcttttacgtgaggaagcactgtatcctgataaatttccgtcggatatttgcccgtaaaacaagcgaggcattgtccgcaattggtgtcttcaaattttcggccgactccttttaacaatccgtctacacttaagaaagaaagcgtgtcggcaccgatgatctgacggatttcttccacggaatgagaagaagcgatcagctcctcatgggttgatgtgtcgataccgtagaagcacggatgagcgatcggcggtgaactgatcttgacgtgcacctctgtcgcccccgcttctctgagcattgtgacaatccggcggcttgtcgtcccgcgcacgatggaatcatcaaccatgacgacccgttttccttcgacaacaccgcggacggcggacagcttcattctgacgccttgctcacggagagcctgtgacggctggataaacgttctgccgacataacggtttttaatgagaccgagttcatacgggatgcccgtcgcctcggcatagccgatggccgcagaaatactggaatcaggcacgcctgtgacgacatccgcttcaaccgcggactcccgggcaagcattttcccgaggtttttccgggcgctgtgcacgttaatgccgtcgatattgctgtcaggtcttgagaaataaatgtactccatgctgcagatggaacggttgatattcatggaaaaacgctctgatttcaagccttcatcgttgatgatcagcatttcgcccggctctacctcacgaaggtacgttgcgccgacaacatcaaatgcgcacgtttctgaagcgaccacataagcatcgcccatgatgccgattgacagcggtctgagtccgttcgggtcaagcgctacgatcatctctgtttcagtcatgattaaaaaggcataagcgcctttcagcatagatagcgaatttttgatttgatccttcagcgaaaagtgtccgctgcgtttaatcagatgagccagcacttccgtatcggaggaagtctgaaaaatgctcccttggttttcaagctgctgcttcagctgtgtggcgttgaccaggtttccgttatgggcgagcgcgaggctgccgttgttttgcgaacggaacaggagcggctgaacattttcatatccgcctcctccagccgttgcgtaacgaacatgcccgatcgcgccttttccctttactttgctgagctcgccgttttgaaatacttcagtgatcagcccttggcctttgtgcgccgtcagtttttcgccgtcagtcgcgacaattcccgcgccttcctgtcctctgtgctggaggctgtggagaccgtaatacgtaatttgcggggcttcttcatgtccccagatgccaaacacaccgcattcttcattcaggcctttgatttcagcaagcatggaatagctcctttccacgcgcgctcaagttctttcgtttgcgcgtgaaccaattgttgtccgtcctggttttgaatcgccagaagtccgtcagccgttacctcaccgatatgaaccgcatcagccgcagccgcttcaaacgccgcttggtgttcttttttgaccgaaacgacgaagcgggattgagattcagagaataataatgccgcttccccttcaacagtcacgttggcgccaaggttttccgtcgtcatgacactttctgcaatcgctacgcctaagccgccttcagatacgtcatgcgcggattgaacgaagccttttttaatcgcgtcaagcaatgctttttggcgtgacagctctatatcaagatcgatttgcggcgctttgccgtaaatgcggccttctgtcattttttgcagttcgcttccggcaaactcaggttttgtttcgccgatcacgtatacaagatcccccgcttgtttgaaatgctgtgtcgtaatatgagcggtatcttcaattaagccgaccatgccgataacaggcgtcgggtagatagccgttccgttcgattcattataaagtgatacgttaccgccgatgacgggtgtgctgagaacattgcacgcctcgctgatgccgtcggccgctttttcgatctgccagaaaatttcaggtttttccgggtttccgaaattcagattatccgtgaccgcaagcggttcggcgccggagcatacgatgttgcgcgccgcttcggcaacggcgatttttccgccttcttctggatcaagatataaataacgggcgttgcaatccgtcgtcatcgccagcgcttttttcgtgccgcggattctgagcactcccgcgtcagagcccggagcgaccaccgtatttgtgcgcaccatgtagtcatattgatcatacacccactctttgctggcaattgtcggctgctgcagcagggcaaaaagcgtctctgtcccatcttttacttcaggcgcgggaacttctgtttcctgaaactcgcggtagtacgcgggttctgctgacggtttgtggtatacaggcgcttcttccgccagtgcgtcgaccggaagttcgcaaacaacctctccgttatggcggaggcggagcattttatcatccgtcacatgacctacggaaaccgcttcaaggtcatatttatcaaaaatatcgacaatttcctgttcacgtccgcgttcaatgacgagaagcatgcgttcctgagactcggaaagcatcatttcgtaagcggtcatacccgtttcccgctgcggaatgagatcaaggttcatttcaatgccggagccggctttgcttgccatttcagcactcgaacttgtcagaccggccgcccccatatcctgaatgccgactaaggcgtcgcattggatgacttcaaggcatgcttccaggagaagtttttccatgaaaggatcgccgacctgcaccgcggaacgtttttcttcagatgaatctgacatttcttctgatgcgaaagtagcgccgtgtatgccgtcgcggcccgttttagcgccgacgtacatgaccgtgttgccgacacctttcgcctggccttttttaatatctttatgatcaatcaagccgacgcacattgcattgacaagcggattgccctcatagcttgcgtcaaactgcacttctccgccgaccgtcgggatgccgatacagtttccgtatcccgcgattcccgccactacttcttcaaacaagtacttcacacgaggtgaagtgagttcaccaaatcgaagagagtttaatacagctatcggacgggcgcccattgagaaaacgtcacggataatgccgcccactcccgtcgcagcaccttggtatggctcaagcgctgacgggtggttatgagattcaattttgaacacgaccgcctgattgtcaccgatgtcaacgattcccgcgccttctccgggaccctgcagcacgcgttcgccgctagtcgggaatttgcgtaaaaccggttttgagtttttatagctgcagtgctctgaccacatcacggaaaaaatcccgatttccgtgtagttcggcaatcttccgataatagattcaatgagtgcgaactcgtcatcactgacacccatttgctgatagagtttctcttcttttatttgttctttacttggttcaagcagtagcgacatgagtttccctccaatttttcacgatagaccggaacaatgtaagaccgtctgcgctgccgagcagttcatcgactgcgcgctcagggtgaggcatcatgcctaatacgttgcctttctcattcacgacgccggcaatgccgctgacgcttccgttaatatcgccgccgtatgtgaagacgatttgattgttttcttttaatctttcaagcgtttcgtcatcacagtagaaattgccttcgccgtgggcaaccggaatcgtaatcgattgtcctttttcataggaagatgtgaataacgtatcgccgttctgtacgattaattcaaccgggcggcagatgaactttaaatctttgttgcgtctcatggcgccgggcagaagtccgagctcctgcagaatctggaatccgttgcagacgccgagaaccggttttccttcggcagccgcttttttcacggccggcatgatgtttgcgaatctggcgatggcgccgcatctcaagtagtcgccgtatgaaaacccgccggggatgagcacgccgtcaaatccgtcaaggcttgtttcctcgtgccagacatactcgacttcttcgccgagttcgtcctttacggcgtgaaacatatcaatatcacagttggagccgggtaacacaatcaccgcaaatttcactgtgcgacaacctcctcaacttcatatcggtagtcttcaatgactgtattggcaaggagcttttcacacatttctttcacgagcgcgtcaagatcgcggtcagatttttcgatcgtcagctccatgtattttccgatgcgcacatcctgcacttcattgtaggtcatgctgtgcaatgcatgctgcactgcgcttccttgaggatcgagcacactttcttttaagctgacataaactttcactttatacattatgaaatgcctcccagtcttttgaaaatctcttcgtatgcgtcggttaagctccccaggttccgtctgaacaaatctttatcgagcttttcgtttgtgtctttgtcccacagacggcacgtgtcaggagaaatttcatccgctaaaagcacccgtccctctgcgtctaagccgaattccagcttaaaatctattaatctgaccccgcagtcttcaaaaatatgctgaagttcttgattcacctggtttgtaatcgatttgatcgtttcgacatgctcaggagccgccgcttttaagagccggatatgatcttctgtgatgagcggatcgccgagtgcgtcatccttgtagtaaaattcgataatcggctgcgggagctctgttccttccgggatgccgagacgtttcgacatgcttccggcggcaatgtttctgaccacgacttcaagcggaatgatgctcacttttttgatgagctgctctgattctgaaacacgctccacaaagtggttgtcaattcctttggcgtgcagatgtttgaaaatcaggcttgaaatttcattgttcagacggccctttccgctgatctccgcttttttctcaccgttaaaggctgttgcggaatccttgtagaccacgcggagaatctgttcgtcttcagtttgataaattcgcttcgcttttccttcataaagaagattattgttcacaatattcacggaaggcctcctaacccgaatgttgggaatattcaatctacggcggctgaagaagccgcctccggctggcttcttctataaacctaaacgctcaaagatcaagtcgacgtttttcagatgataattgtagtcaaagcaatcggcaatctgttccggtgtgaggcgggacgtgattttttcctccgcttcgacaagctggcggaacggcacttgtttttcccacgcttccatcgctttcggctgaaccgtgtcatatgcttcttcacgaggcagacccgtgtcgattaaagcaagcagcacgcgctgagaatagattaaaccgagtgtgcggtccatgttgcgtttcatattttccgggaataccgttaagtttttgacgatgttgctgaatcggttcagcatgtaattcagcgcgattgtcgcgtcaggaagaatgatgcgctcagctgatgaatgagaaatatcacgctcatgccataacggtacattttcgtatgccgtcagcatgtacccgcggatcacgcgcgccatgcccgtcatattttccgacccgatcggattccgtttatgaggcatagccgatgagcctttttgtcctttagcaaaaaactcttccacttcacgtgtttcactcttttggagaccgcggatttccactgcgaatttttcaatgctcgtcgcgatcaaagccagtgccgccatgtaatccgcatgacggtcgcgctgtaatgtctgagtggaaatcggcgccgctttcagcccgagtttttcacagacatactgctctacgaacggatcaatatttgcatatgtgccgaccgcgccggaaagcttgccgacttcgatcccttcttttgcctgcttgaaacgttcaaggttgcgtttcatttcttcgtgccaaagcgcgagcttcaggccgaaagtcgtcggttccgcgtgtacgccgtgcgtgcggcccatcatgaccgtgtatttatgttctttcgctttttcttttataatgtcaacaaatctctcaatgtccttgagcaagatctcattcgcctgttttaatagataggaaagagcggtatccacgacatctgttgacgtcaggccgtagtggacccattttctttcttcgcctaatgattctgaaaccgcgcgggtaaatgcaacgacgtcatggcgcgtatcctgctcgatttccaaaatccggttgatgtcaaaagacgcgttttcgcgcatgaccttgacgtcttctttcggaatgacgccaagctcagcccaggcttcacaggctaaaatctcgacttccagccatgcctggtatctgttttcgtccgtccagatcgcggacatttcaggtcttgaataacgttcgatcattatgctcgtcctccgtctcttttcatccatatgttcgtgatgtcctgaatccatgtttcatcaggcttccgcaaaaatgtcatatgccccattttgcgcccttttttaatctcatgttttccgtacaggtacagtttggcttcttttaaaagctccgtatgctcctccgcaagcttcacttcctcaccgagcagattcaccatcattcccggtttgagaagatcggttctgccgagaggaagtccgcagaccgctctgatgtgctgttcgaattggctcgtttcacaaaggtcgagcgtataatgcccggagttgtgaggacgcggcgccagttcattgatcaaaaggtctccgtcttctgtgacgaacatttccaccgcaagcggcccgacaagctccaatttctccgcgagctggacggcaagcgcctctgcccgcttttgaaccgtttcctccgctctcgcgggcacgatgctttggaacagaatattatttttgtggatattttcagcagccggaaaggttgaaatctcaccgtgcaccgatctcgtcacgataacggaaagctccatccggaacgatacccagctttccagtatgcacgtgccgttttctagcagcgcggccgcttcgtctgtctgtccttcttccttaatgacaaattggcctttgccgtcatatccgccgcggcatgttttcagcaccgccgggagccccagtgcctgaacagcttcctcaagctcccgtccgctgtttacgatccgataaggagcgacttgacagcctgctgactggatcgcctttttttccgtttccctgttttgggtgataagcagcagctcgcttccctggggaagatatgcatgttctttgagccagttgagcgcctcgtaatcgatattttcaaattcgtacgtaatgatgtcactgactccggccaatttttgaatcgcttcacggtcattgtactgggcggtaatctcaatatcggcgatctgtccgcatggcgagtctttcacgggatcgacgactgcgactttatagcccatctgttttgcggcgacagccatcatttttccgagctgtccgcctccgataatgccgatgacggcgccgggataaatcgtttttttatcagacaagctgatcactgctttccagcaccgtttgttttgtcgcatttcttctcgcctctagtttatccgcaatgtcaccgtcaaatgccgacaaaatctgcgcggctaacagacccgcgttcactgcgcccgcttttccgatcgccgttgtcgcgaccggcacgccgccgggcatctgtacgatagacagaagagaatcaagcccgttaagcgattttgtctgaaccggtacgccgatcaccggcagtgtcgttttggccgccgtcatacccggcagatgcgccgctccaccggctccggcaataatgacttttaagcctctgtctctggcgctttctgcatattcaaacatcaaatcaggcgtccgatgcgcggatactacctgtttttcataaggaatgtgaagttcgtcaagtatgtcgcatgcatgtttcattgtctcccaatcggaggtgcttcccatgatgattcctgctagcggctgcattctgttcccaccttctcatgctttgtttttcagaaaaaaaagcccggcttatattgcaactatgaggaagcaatacaaaccgggcatggcgcgcgtatcgtcagtcgttcgcttctgcgatatccatgtcagctgtttatcactttcctgcatagtccggccgtttacggcagccgggtagaaacttatgggccatattcccaagattatatgaggtcgtgttttgatttcatgtttatcttaacaacggacttggataatgtcaacgacattatcgaacgatataaaaattctttcttttaatgttcgtgtttagatcaatttcccttcaaatacgatttttttcccgcaaggaacgacttgaattgatccattttctttcttttctgtaaagatcggctcttccatccgccggacgggcatataaccctcttccttcattaaagtgagaatggtgtcaatcgtttcatgttccgttacttcaaaccgtttcttttttggctttgtcattccttaattctcctcttcttcactgctttcacccagaatccgccgtggatcgttttcggctcaaaggcgatgataaacgctttttcatcaagcgttttaatcgtatcatacagctgaagctcatatttgcgcggcgtcagaatctgcatggcggtccggtctccttcaagtccgcccgcaacccagcttgtaacaccgtatcctttttcccggagctgtttcggcaggtccagatcgagctccttcgtaatgacgttgactgttatgtagccgagcgccagtttttcttcaattttcattcccactatgacgccgaggccgtagccgagcgcataggcaatgacgttttgaatttgattcagattgtcgagcacaagactcaggccggtcacatacacaaggatttcaattgtactgatgcctgcggcgaaatagcgctgtccctttaatgtcagaatcatcctgatcgtaaagaaagagacatatataatgttaatgatgagaataatgagaaccatacctatactgttggataaaattgtctgcatcactgattcccctcctctgactttgaaaagccaatctttcaattaaggatagtttaccctcttttcatcattttcaaaagaaaaaaaagcccgccccgcaaggcagactctcaagctcttatcagtgaagctcggcttttttcaatcgtttgacggcttcatattccttctcaagttcactcagcgtgtacccggacagttcctgaacatggtcttgataaaaccctgagcggatcagttttgtcctcaggtgctgttttttccgattaatggcttctcgcaacaacggggccatcttcatcatccctttccgaatcataaagagtagtgccgctttcgaattgctgttgctctcatcatatctcggccgggtcctcaaaacaacacgcttcattagaaaaatttgtaaacattgtgaaagacaaatttcgacttataaaggaatcagcgaagcagtaaagtactcggaaatgagcggccatgtcacagccgtaaaaacgagcatgatgatgaccgccgcggaaatacagtacatcacgtcagccgcaggcttttcagccgatttgtatagaatctgcacaaactgcaccatcgccgaggcggccagaaacaaggtcagcgccgtaaacaccacggtgatgaccggcagattcaatatcgcgaaaatcatccacacgatagagcaggcgacagccggaaccaaaagcgatccgacccccgcggccgcatcccgcatcgtaattttctgcttcatcatataacgtgatacaagccagaccgcgccggccgcagcggcaaaaaagacgagcgtatacacgagaacgacggtaaagccgtcaaaaaacgtatgatgccgctccccgtatccgagaggcctttgctggcttgccctcagctgaaaccaatttccgattgagaaaaagatactgaatacaagcattgaaataagagcatatttaaagcgggaaaagccgtcttccccaacgaccttcaccggtgatgtcaaaatgcgcagcgcgaaacggcaataacgtttgaccgcggcccatgcagaagcgagtttttccgtaaaagccggagccgggcgccgttccttttcttttttcttttgcttttgataacgtcccgcatttctggacattctcgacagcggttcttcatcagttccctgatgctgtttttcttcttccaacgtttcttttctttcttccgtcatgtcagcaactcctatcaaaaaaatacggcggaatttgtttagcaagaaaataaaacacttatataaggtaccgaagcggccttaaacagtcaagcggttttcttcacccggacacccacatgacgttttatattatgtattggttttacggaataggacaaaaacaaaaaaccggctttccccagccggtttttccgttatttcaagaagatgaaatacaggataaagatgacgaacagcccgtacataatcgggtgaacgctttttccttttcctttgcagatcattgtaatcgggtagaaaataaaaccgatcgcaatccccgtcgcaatactgtacgtcagcggcatcataatcatcgttaaaaatgccggaacagccacctcgaatttatcccaggcgatcttaccgagcggcgccaccatcagcgcgccgacgataattaaagccggagccgtcacattcgtggtgacaactgacagaagcggcgagaaaaacatcgccagcaaaaagagaatgcccgtcacaacagccgcgaagccggagcgcgcccccgccgcaacgcctgagctggattcaacataagaagtcgttgtagacgtaccgagcacggctccgataacgattgatgttgaatccgccaaaagcgctcttcccgcacgcggaagtttgttttccttcatcagcccggcctgtgtcgctacagctaccagcgtaccggccgtatcgaaaaatccgacgaacaggaaagttaaaatgacaatcagcatttgtacggagaagatatccggaaggtgcatccacgcctgtccgaaagtcggcgcaagactcggcacgctgccgacaatgtgtgtcggaaccggaatcagcccgcagatcataccggcaaccgccgtcaaaagcattccgataaacacgccgccgtttacgcgaagcaccatcagaatgaccgtcacaataacaccgaaaaccgtcagcagcacagggccgctgtgaatattgccgatagacaccaaagtcgatgagttcgcttcaataatgcccgaaccctgcaaaccgacaaatgtgataaacaaaccgatacccgcgccgaccgccaatttcagctcaggcggaatcgcattaatgattttttcccgcaatcccgtcagtgaaagcgccacgaagataattccggaaatcaagacgccggaaagcgcagcctgccatgaaatccccatgccgagtacgacagagaaggcaaaaaacgcatttaatcccatacccggcgcaatcgcgatcggatactttgcaataagccccattaaaatacagccggccgcagatgccaaggctgtagcggtgaacaccgcgccctgatcaatttttaatgcttcgggaaatcctttcacaccgtttaaagacaatgtcagcggattgacgaacagaatgtacgccattgacaaaaaggtcgttaaaccgccgatgatttcattacgatagcttgtccccagctcatcaaactgaaaaaattgcttcaagccaattgcctccttcattctctcccatttattctgcccgttatccgccaaataaaaaacgccccaaatacatttgggacgcttgactacatacgttcagtctgaataaataagaatggattatttatatcaaacgattgagattgatccgtagtcaagccatttacggtagcttggtagaaacttgcgggccatatccccgccattatacgatatctgcatatttgatttctgagtctattgtatcaattcaattttgaaaactcaataaaaaaacgaacaatccagttaaaaaaaattggtttattcgttaattgaccaaaaatggaagacggcaagggccgccttcccggcatcattttccgttcgcaggccgaaccggcaccgcgaatgtgatccccttgtcatccgccagcaagttcataaccgtttgattgacgtacaaagcatatgaatcgaatgagaaatcgcgcaatgaatagtctttatcggatgaatcatctaattcaaaaacggattccatttcaccctttttaagattcgtgactttcgccttattccctttcagataatagcctttttcatactcattaagcgatggccaagttttcatttttttcgtattgccgagaccgattgattcaccgacattcatcagctgatctttatccgctttgctgtaattaattcctgtgaattgataatcgacgatcacccgtctgtcttgctgtttgatctttttgatggtaatgccgacatgatgatgtttcgttttataactgacgggcagttttgttttcagaggcacgatttctcccggctctgattctgtttttatatcacccgttatgaaaagtgttttcgctttcgggtctatcggtttgctgaattgagtttggccgcgtattcttttcccgccgccgggaagattcttcctgccgccaagttcaatattcgacatcgtcatttcataatggtttccagcatcatccgttgcttcgtcaatcgagatggcatcatttttggctgcatcatagaagtcgatagaatacaggagagccgatcccatcgttccgttttccgcccggatatcgaaaaagcggtataatccgtgatttacattcacagctttcgttccttcaagagaaacggacttttgttttttaatagggagtgtaaagcgccagtttccggggatatccttgatttgtgtaatgacaagcggaagcttatcaccgtctttcagctttgagccgtccgtgaacaggcgaagctgccccgcgtaccgcccgtctttcatttttttcatatcactgctgtcataatcctctgctaacatattccgtggatctttataatcgacttgaaaagagatgctctcctcatctgatttcaaattatcaacgataaagttataaacgagctgtccgctgtcgtaatacacacttttcactgtcaccgtgattccgcgtgattccgctttttcgttcagttttgtcaccaaattgcttttaaacagcgcagaacctgccttatcctgaaacagactgtaaatttgtccggcaacaggaatgtttcccatagcggtgttaacggagggcatgaacaagcctgaggacagatacagaataaacagagcagcagcaaccgcgaggccgtttatcacttttcgtccccatctccgtctgacggcgccttcttttccggcacggacagcagcgctgtgtatcacgtttttcaactcagctttcggcacgtcaatgtcctgatacaattgcttcatttgatgcttttccatatgtgtttatcctccttttccagttcctgcttcaatgcttttctcgccctgtagagatgcgtttttacagtgccttccgccataccggtctgttcagcgatcataccaatcgagaaatcttgaaaataataaagctgaatggtcagctgtatatgttcgtcaagcgtttccagagcattccgaagatctatgtattcttcaatattcttattctccgcgcgcgtatcgtgctgcggctcaaacggaatgacgtctccgtgctttttcctcatcgcaaaaatcgtatgaagcagaatccggatcagccacgttttaaaatatttcggctccttcagctgtgcgatatgaagaaaagccttgtaagccgtttcctgaacagcgtccagtgtatcttccttgtgatgcaaataaagataagctgttttatataaagtctcctgatgggttgtgatcagtttttcaaaggctgcggcatcaccttttttcgcctttttgatcaatcgttcttccttcaccttatccacctcctatgctgttagatatgaatcggggcaaaacggtttcaaaaagatgaaaaaaaacgcctcttttttaaaagagacgttttttatcttcatttattcccactcaatcgttgcaggcggcttgctcgtaatgtcatacacgacgcggttgatgtgtttcacttcgttgacgatccgtgttgaaatcacttcaagcacatcccaagggatacgcgcccagtcagatgtcatgccgtcaattgatgttacggcacggataccgattgtgtaatcatacgttctcgcatctcccatgacgccgacgctgcggatgtcaggaagaaccgtgaagtactgccagatgtcgcgctcaaggccgtggttcgccacttcttcacgcagaatcgcgtctgattcacgaacgatttcaagtttttcttccgttacttcaccgagtacgcggatgccaagtccagggcccgggaacggctgacgccatacgatatcatccggaaggccgagctctgtgccaagcgcgcgcacttcgtctttgaaaagggtgttcagcggctcgatcagttcaaactgcatatcttcaggaagtccgccgacattgtgatgcgatttgatcgtttgcgccgttgcagtaccgctctcgataatatccgtgtaaagcgttccttgcgcaaggtaatcgatgcctttcagcttgtccgcttcatcatcaaatacgtaaatgaattcgttgccgatgattttgcgtttttgctcaggatcagaaacacctttcagcttgtttaagaatctgtctttcgcatcaactttaatgacattcatattaaagccttcgctgaacgttttcatgacgccttcagcttcgcctttacgaagcaggccgtgatcgacgaaaatacaagtcagctggtcgccgatcgctttatgaattaaagcagccacaacagaggaatcaacaccgccgcttagcgcgcaaagaacctgcttgtctccgactgtttcgcggattttttgcatttcgatttcgataaagttttccattgaccattcgcctttacattcacaaggcccgaagacaaagtttttcagaaggtcatttccgtattctgaatgacggacttccggatggaactgcacaccgtaccattttttgtcttttttgctcatcgccgagttcgggcagtgatggctcgtcgcgtctaccgtaaatccttccggcacttgtacgactaagtcgccgtggctcatccagacaacttgttcttccggaagatccttgaacaagtctggagttccttgaatctgaatgttcgcttttccgtattcgcgctggcttgccgcctcgactttccctccgaggtaatgagtcatcagctgcatgccgtagcagatgcccaatacaggaatatcgagttcaaagattttttcatcacagcggaaagatccttcatcatatacactgttcggtccgcctgaaaggataattccttttggattcatttctttgatttcctcagctgtcaacgtatggggatgcagctcgctatatacgccaaattcacggatccggcgggtaatcagctggttatactgactgccgaaatcaagaacaagaatcatttcattcactaacttcgtcatggttgtcacctaatctcctctaagtttttgacacagaaaaaacggaggacacacgttcagccctctgtcggcaagacttgtccggaagcccggctttttaacgctcccgggctcccatttaacattcatatattctaacaacaggacgatatgcggtcaagactatcttcttttaattatattttcccacaactgtcccgattcattccaaagctttgcggcattatcgctgcggtataaagcacgctcatagcgcagcgtcagctcggacatgtcgtttgtatggtgcgcctcatcaacccttgcggcaaaatcgcggagcgtttctccgtctcccctgctgaacccttttcgtttcagctggcggagcagcgcggcatatgcgtcgaaaaagacgtcttcatccgttcgccgcttcaatccggctgctgtaacgtgcggaatccagcgcacccggaacagccaggcgagtgccgccgcggctgaaattacgatgacgatggctgcatacggccacaggtgtgccgcggttttgttgcggatcacaggctgcggtgccgcgctgtgatcccgctttttcggtgtttcttctttttccggctttgtttcctgacgctgcttgtcagacggtgaatccgaattccccgctgagcctccgctgtcttttgccgcggtatgattttgctctgacgtaaactccgtcggattggtgaagccttttgtcggctcaaacgtcacccagccctgatcgggaaaatacacttctacccacgaatgggcgttgttgtttgtgacttcataaatgtggccgttatggtcgcctgcccctttatattcaccggatgtatagcccttcacccagcgggcgggaattcccgcagagcggagcagcacggccattgccgatgaaaagttatcacaatatcctcttttcgtttcaaacagaaattgatcgacataatcctgattgtgctccggaaccgcgacatcctgtgtattatacgaaaatgcggaagatccgagataatcctcgatcgccttcgctttatcgaacatattatgatgatcccgcgtcaatctgtccgcaagctgtcgcactcttcccggaaggctgtcggggacctgtaaataccggtcattgaattgattctgctcacggtatcgtttcactttcacttttctgagatcattcagcttaaagacgggcgcctgaaaagtcaccgtgtaccgtcccatattgcggatgttgcccacttgttcactgaccggcgtaatttgctcggtgtttccgttcatttcaagctgaatcgagtgcttcggtttaatattggagacgccgatcggatacatgacgtgattatagagataattctcatcaatggacacctgtgccgtataccgtctcgtctgcacactccggtcaaaccatatatcttccacattgccgccgttcagtttataggacatgccctgatcggtctccacccagcctttccccgtgtatgtatctttcgtttccacccggaagtacgcccgttcttttcccttccatgtaaaaaccggcgtatcatcctcctgaaaaggaccgcccaatgtttcatcatgattgccgtagccgattttactttcggcggcgggcacttctttgtggtttgtgattttttttagaaacggcacgggatccggccagttcgggtctgatttcggagccgccagaccgaacactacggaagcgcagataaacagcatcagcggcagaaaccatttgagtatcaatctttttttaaacgctatgtgttccgtaagccggatgcgctccatatacaaaagccccatcatcaaaaagccgataaagacgatccggatgacggcgtacgcggcatcataaggagtaaacgtatcaagcacggtgatatacgccaccgtcatgataaaaaagaataatattttccgctgatagatcacccagtaatgcagcaaatacacgagcagccataaaagcacaaaaaacagcaacgtgcggaatgacggattcatatcattccatcttccggttccgatgtggcgggcattttgcatcacgtcccgcaaaaaagaaacgagccattccggctgaaaaatagaacctttataaaacaggatgtgaatactgatcaacgtaaacagaatgcaggacggcacggtcacgtaccacctcatccggaagaatgacagcagaaatgccaaaccgataaaaacgatgaaaaaaccggtatgttttgtatccgtaaaattgtgcagcggcctgagccattcccataacaataaaaaagcgagaaaataaaacagcagcagactcagcctgcttccctggttctcgtcatgcggcatggcgcgccacctctctttctaaacaacatgggacacccgtttgtccctgatcatttgcaccttaatatttttctgagcgaagatgagagcgagtttccgttctttctccgaaagcgcggcattcgtttctttcgccaaaaacaccgtcatgtcagcacggccgggctcagcctgtttgagaaggtcttctgtaagactgcccgtcacgacggcaatggaagctttacccagttctttccctaaacgcccgcctgcatcggcttcttccgactctgaagctgatgccaggtaacgcagcatctgtctgaaatgccgctctccctcccggacgggaaatacagtccggtcgctccccaatgaaataaatcctgcgggagagcccttcacaagcgccgtgtaaagcagggatgccgaagctgacaccgcggcttcaaacgaaggggacggcctgcagtccaaaaggagaatcatattcatactctgcaacgggtcaaattccttcgtcatcagctcatttcgacgcgccgatgttttccagtcaagtgcggaaaaccggtcgcccggctgataatttctgacgctcgcagccattgctgtgcggtgtacctgaaacggagcgccggcacccgcaccctcttctccggatgcagcctgcggcttatagtgaacaggcccgtacgccgggaaaaccagaaccgtatccgttacggaaaacgacgccgtcttgtccaaaagcccgagaacatctcccgtccgaactctgatcgtatgtaaatgatgctctccgcgcggcacctgcggcagctcatattgtaacgtcatcttcctttgaaaccacggaaacacaagctgtttcgcactgcgcctctcaccaagcgtttccggcatcacatcttcaatgaccatatatgtcagcggaaacggcaggcgcctcgtcagcctgatggtggcagacagcctgtcgcctgaggttaactgggcggaggacacgtcacgcgtcacctgaaacgcccgcaacgggtacacagcgaccagcccggcgtaaacggtaaacggcaaaaacgcataaaataaaaaccagctcacaaatccgccctgaaacatggcataagaaaagacagccgccgtcagtacggccaacataagcagcttccagccatatagaagccaatgcatcttctttctcattagcggaccgacatcctttgaacgggaactttttccgtttgcatgatgtcttctataaccgcttccggcgtcacatcgttaaatttcgcctcggcggtcaagatcattctgtgcggcagcgtatacggagccaaatactggacgtcatcaggaatgacgtaatcgcggtcatgaagcagcgcgtacgcctgcgcggctttcattattgaaattgaaccgcgcgggctgacgcccagatgtacggacggatgccggcgggtatgctgagtaatgccgacgatatacgctttaactccatcatccacccgcacctgctccagtttttgctggagggtgatgaactgttctttagaaatgacgggctcgattgtttcaagcggattgcgcccttcctgcaaagacagaacccgaagctcctcctcggcagtcgggtagcccatgcgcagcttaaataaaaaccggtcaagctgggcttcgggaagcggatacgttccttcatattcaaccgggttttgtgtggccatgacgaaaaacggctcagccagccgcattgtctttccgtcaatcgtgacattcccttcctccatcgcctcaagcagggaagactgagttttcggagaggttctgttaatttcatcagccagcacgatattccccatgatcggtcccgggcggtattcaaattccattgttttcgtattataaatagagacacccgtcacatctgacggcagaagatccggcgtgaactgaatcctcttaaagtcagctccgatcagcttggccaaagcccggaccatcatcgtttttccgactcccggcacgtcttccagcagcacatgcccttttgcgagaatggcggccagactgagtatggcgatatcccgttttcctatgatgatgttttcaatatgctcaacggctttctccagcagcggatgcagctcttctttataagccattcttctcctcctagtcatctctcaaatttcaattatcgtaacctaactttaccacaaaatataaacagtataaaaaaacgtttccagcgaattgtttccagtccgaaaaaggaaaaaagctccctttagaaaggaagctttatttcagctggagaggctccatatgaacgtgtgaatggtcaatggcatgttcctctttcatcccggcgccttctgctgtacgaatgcgaaaaaaatgtcatattttcttacatcattttcaactgtctgtggcatttatgatagaataatacttgtctgaatattcagcataaacaaaccaaaaggaggcaaagaatgaatcagcctaactctttatctaagggattaaaaacccggcatatgaccatgatttcaattgccggcgtgatcggcgccggattatttgtcggaagcggatcagtcattcattccaccggacccggagcgattgtctcctacgctttagcaggattattagtgatttttattatgagaatgctgggggaaatgtcctccgtcaacccgacaagcggttcgttttcacagtacgcgcatgacgccatcggtccttgggccggttttacgatcggatggctgtattggtttttctgggtcatcgtcattgccattgaagccattgcaggcgccggaatcatacagtactggttcccgggcattccgttatggctgacgagtctgcttctgaccgtgctgttaacactgacgaatatttattcagttaaatcgttcggcgaatttgaatactggctttccttagtgaaggtagcgacgatcgttgtcttcttaatcgcgggatttgcgttcattttcggaatcgttcccggcagcaagccggtcgggctggaaaatttggcgggcagcggcggatttttccctaaaggtccaagttccgttctgctcggcatcgtcgttgtcattttttctttcatgggatctgaaatcgtcgcaatcgcagcgggagaaacgtcaaatccggtcgaatccgtcacaaaggcgacccgctcagtcgtttggcggatcattattttttacgtcggctccattgcggttgtggtcacactgctgccatgggattcagccaatattttggaaagccccttcgttgccgttttgagccatatcggggttcccgcagccgctcaaatcatgaatttcatcgtcctgacagccgttctgtcctgcctgaactccgggctttatacgacgtcacggatgctgtattcactggcagagcgaaatgaagcgccgcggcgttttatgaaactgagtaaaagaggcgtaccggttcaagccattatcgccggcacctttttttcctacattgccgttgttatgaactacttttctccagactccgtatttttgttcctggtcaattcatcaggggcgatcgcactgctcgtctatctcgtcatcgccgtctcacatctgagaatgagaaagaaaatcgaacggacaaaccctgaatctcttaaaatcaaaatgtggttctatccgtacttaacctacctgacgatcatcgccatttgcgccatcttgttatctatgctgtttatcagttcaatgcggtctgaatttctgctgacaggatttattactctgctggtacttgcctcatatgtattccgcaaaaaacaaaaaccgaaagagagcgcttccgaaagccgggttgcgcaataaccgcaaacaccccccctcaaaaaagggcgggtgtttttttaaccaacctgttccaggcagcattaactgtagtacaggatttcaataaatgataaggacaggatgaaaaatggcactagaaaaatttgcagatgaactgccgattatcgaaacactccagccgcagaagaaatcagacggcagcacgtattacgaagtcaccatgaaggaatgctttcacaagctgcaccgcgatctcccgccgacccggctttgggggtataacggtttgtttcccggcccgacgatcgacgtgaacaaagatgaaaacgtctatattaaatggatgaatgacctgccggataagcattttctgcccgtggatcataccattcaccattcagaaagcggccatcaggaacccgatgtcaaaaccgtcgtccatttacacggaggagcaacgccgccggacagcgacggctacccagaagcctggttcacaaaggattttaaggaaacgggtccttattttgagaaagaggtataccattatccaaacaaacagcgcggggctctgttatggtatcacgatcacgccatggcgattacgaggctcaatgtgtacgccgggcttgccgggatgtatatcatccgcgagcgaaaagaaaagcagctgaagcttccctccggagagtacgacgtaccgcttatgattttggaccgcacgttaaatgacgacggttccttgtcttatccaagcggacctgctaatccttccgaaacgctgcccgacccttccatcgtcccgtttttttgcggaaataccattctcgtcaatggtaaagcgtggccgtatatggaagttgaaccgcggacatatcgtttccgcatccttaatgcctccaatacgagaacattttctctctcgctcaataacggcgggaagtttatccaaatcggttctgacggcggactgcttccccgctctgtcaaaacacaatctatcagcttagccccggccgagcggtatgatgtgctcatcgatttctccgcctttgacggagaacatatcattttaacgaacggcaccggctgcgggggcgacgtcgatccggatacagacgccaatgtgatgcaattccgcgtcacaaaaccgctgaagggagaagacacaagccggaagcctaaatatctttcaacaatgcctaatgtaacatcaaaaagaatacacaacatcaggacactgaaactcacaaatacgcaagacaaatacggccggcccgttttgacgctgaataacaagcgatggcatgatcctgtgacagaagcgccgaagctcggcgcaacggaaatctggtcgattatcaatccgatggggggaacccatccgatacacctgcaccttgtttccttccaaatccttgaccggcgtccctttgacttagagcgttataacaaattcggcgacattgtgtatacaggccccgccgtcccgcctcctccaagtgaaaaaggctggaaagacaccgtgcaggcgcactcgggggaagtcatcagaatcgcggcgactttcgctccttacagcggacgctacgtatggcactgtcatattttagagcacgaagattacgacatgatgagaccgatggacgtcacggataagcagtaaacaaacatccccccctttctccagaaggggctttttttatttatccaaaaagaaaaaataagaaggcgcttttttgcatatactgtaataacaggaagacgatgcaccctcattggaaatctggatagaaaaaggaattaggagattagggaaaagtatgagacaatgaaggagtgcacgaaaattcataagggaagaagtgactttatgtcttactacaacaaacgtaatcaggaaccgctgcctaaagaagatgtcagtacgtgggaatgcacaaaagaggactgtatcggctggagcagaaagaattttgccggcagtgataccccgacttgccccctttgcggcagtaaaatgatcgacggcgtccgttcgttggtaaatctccaaaacaataatcaaacggcatcaagttagacctcccttttacgagtctcaacatagagaaggcctccatgtctcatgagaggcctttgcgttatcatgtccttttatgatgcaaaggagcaatgaacatgaaaaacgatcggcagcagaaagatctgaaggaaatggcaaaacggcggaaaatgaaccttgccgcacagtcattcatcgaaacgcttcattttgccgttccgattctccgttttttcaaatggctcgcctcagccgcagccagctttgttcatgaaaaaacacccagcgggcgctgagtgtttttttcatgattggatgacggaaaaactattgataatgccgtggtcattttcccagactttttcgcattttttcgtatccaaatgataagcataaatggtccggaccttcgcattccgccccgtttcatccttcagacgcttagcgccttttgcttccgccatgaaataaatgatgctgccgtctttagaaaactgaggctgggcatcaatcagcggagcgaagtccttcccgtttgagataatcgttttatcttttttcgttttgacattcatcagacggatggacgctttttgttccgtccctttttgtgtataagatgtaaagacaaggttctttccgtccggtgacaccgccacgccgctgataaactgttcaaggtttgtcaggtcctgaaggtgttcgccagctcctgctgcaaaccggatattcgtcggttcagggtcaatccccttctcatttgcctcatccgttttttgataatcctctttgacggaataatgcagaagcgcaaaatcgttttggctgcggttataaaagaagctgcttacactgtcgtctttctcatcggcggcaggatacagattttcataacgtttcgttttcaaatcaaaagatgcgagacggaaaatatcttcatccgcttttccgagacggaaataaatgtgcgtcagatcctttgataaaaacagactgtcagcgcttgccgttcctttataaagcaccgtcttctttttcgtcttcagatcaagcttatacagacgcatctcattttcgtcattattcccgacaaaatagagcacctgatgggcgtcatccagcgcaaacgccggatatgccgaaagcttttcctcgtacagcacgcggccgtcctcgtaatatttcgtcatcagatctttgtctgtaatggaaacaagcagcttgtcatggccgccggagacaacggcttttccgccgccgtcgctttttcctttgatcagtaaaacggacgcgatgaccgccgccgccaaaacggcggcaagcaacatccagatccatcgtttcttcttcattatcaatctctccgtcaatcagaaaaagcaagaatcagagtccttgctttttaagatggtctattttaatagctgtagtgtccggatactcttcctttgcttaacggatatccgagcgctttgaacgctttcgggctgacatccaatacggcattcggcagacggcctacatcatttttatatactgtgataaccttttttggttttgctttcgcataagctctgattttcgttccgtttctcggaacgtcaaatcctaattttgtcgcgcaatcccagtgtcccagttttttaccggaagatccttttttaccgactccattataccatgtaatatttccgttcacttttttagcacttgcatcagaagagaaactgatcgctcccagcgtgcttcctgctaaaatcaataaggctaagaataacttcttcaagctttcgtcctcctgattctttattctaggcaaaattatacaccaagaagacgattataatatttcaatcactttacatgttcattacaacgtgatgagacatgcacataacgacggcacaattacctgttctatataattccatggtaaattatactacaaaatttaattcattagcgttataatattcatagagtatttctgcattcaatatggactttttataaggcctattgatagttgcataatatgatatattttgagaaatcaggctttaggaagcactttattccttttaaccgtggttcatattgatcatgtacctatactcgtttcaatcagactaggagtgataatcaatgaaagcggcaagatggcacaatcaaaaagacattcgaatcgaaaacattgatgaacctaaagcagaaccgggtaaagtcaaaattaaagtcaaatggtgcgggatttgcggaagcgaccttcatgaatatttgggaggcccgatctttattccggtcggcgaacctcatccgttaacaaacgaaatggcgcccgtcacgatgggtcacgaattctcaggagaagtcgtggaagtgggcgaaggcgtcaaaaattacagcgtcggcgaccgtgtcgtcgtggaaccgatttttgccacacacggacatcagggagcctataaccttgatgaacaaatgggattcttaggcttagccggaggcggcggcggattttctgaatatgtatccgttgacgaagaattgctgtttaagcttcctgaagagctttcttacgaacagggcgcgcttgttgagccgtcagcggtagcgctttacgccgtccgccaaagcaaattaaaagcgggcgacaaggcggcagtttttggctgcggaccgatcgggctgcttgtgattgaagccctgaaagcggccggcgccacagatatttacgcggttgaactttcaccggaacgtcaggaaaaagcgaaagaactcggcgctatcatcattgatccgtcaaaaacggacgatgtcgttgaagaaatcgctaaacgcacaaacggcggcgttgatgtttcttatgaagtaacgggcgttcctgtcgttctccgccaggcgatccagtcaacaaacattgccggtgaaacggttatcgtcagcatctgggaaaaaggagcggaaattcatccgaacgatatcgtcatcaaagaacggaccgtaaaagggattatcggataccgtgacatcttcccttccgttcttgcactgatgaaagagggctacttctcagcagataagctcgtcacgaaaaaaatcgtgctcgacgatctgattgaagaaggcttcggcgctttaatcaaagagaaaaaccaagtgaaaatcttagtcaaaccgaactaaaccgttcagctgaatatcagacacatccgaaaaagagccgttccggctctttttttcatctcatcgtctttccttccttttccttttaaaaatgatcccctctgcgcaaactatttttcaccctgtcccgtctatccttaggcagcagcctatgatacgtattttttaaaaaggagccctttgaagcaatgaagaacgaaacagccaaagcgtcgcttgtgacgtgcataactgagcgcaaggaagacttttaccggcttgcgtacagttacgtaaaaaacaaggatgacgcgttagatattgttcaggaatcaattcaaaaagcgctgacatcggtcgaatccgtcaaaaaccccgatgtgatcaaaagctggttttataaaattttagtgcgcacggccattgattttctccgcaaacagaaaaaactgaaagtgatggatgatgaaacgatcgagtttttaagccgaggaaaggaagatcactacaaggacacagaccttcacgaagcgcttgatgacctgccgcatcaatataaaaccattatcattctgcgtttctttgaagacctgaaattagaagaaatcgcggacatcacgggggaaaacatcaacaccgtcaaaacacgcctttacagggggctgaagctcatgcgcattcagctgacgaaggaggatctttcttaatggaaaagagattagaacaattaagagaagagtataaaagtgtgcccattcctaaggaactggacagcattgtcgaaaaagcccttcagcaaaaaccgaagaaaaaacgaatcgtgatgtggccgacatccgcggcagtcgctgcggccgtcttatttaccgccgttgtcaatatcaacccggatgccgcacaagccatgtctaaaatccccgtcatcggcaaagtcgtccaagccatcacattcacggagatgaaggaagaaaagaaccaatcaagcattgatgtgaaaacgcccgctctgtccggactttccgatcataaactcgaagacagcatcaaccggcattatatgaaagaaagcaaagagctgtatcaggaatttatgaaggcgacctcaaaaagcaaaaaaggccacctcagtatttacagcgattatgaaaccgttactgacacagcggatctgatctcaatccgccgtgatatcgaaaaaacgcaagcttcatcttatacgcaaagccgttacatcacgattgataaaaagaatgaggccgtgcttacgttaaagagtttatttaaagatgaccgttatattaaagtcatcagcgaaaatattaaagaacaaatgaaaaaacagatgaaagaagatccgaataaaatatactgggtcgaagaagatgatatgacggagccttttaaagccatccgcgccgaccagaatttttatattacagataagcacaaacttgttatttcatttgatgaatacgaagcggcacccggatatatgggcgttacagagtttacaataccgacctccgtcatctccaagctgcttgtcggagaccgctacatcagataaagaaagaaaaaaatccatgatatccgcagatcatggattttttctttcgtcccgcaacagccaagatgcataagggacccttttcatataacagacgccggactgggactgaaaagtttaagaaaatcacagcatttcatacattttttctgaaacaaaatccccttccgaatgcgtctaattaacggaacaaatggaagactgtacagaaatcagctatagctatccgcaaaacagcgagaatttccgcacacattattggaggaataccatgtcagacaagtcactgcatcaccgctatattcccggactggatggacttcgcgcctttgccgtcctcgcagttatcgcatatcatctgaattttaactgggccgacggcggtttcattggtgttgatatcttttttgttttatcggggtatttaattacatctattatattgcctgtccaaggcaatgccatcacccttgatttgcgtgatttttgggtgcgccggatcagacggcttctgccggcggcttatctgatgattatcatgacggtcatttgggtcgtattgtttaacagcgagctcctgcataccgtacgcggagatgcggtctcctcacttttttacataagcaattggtggtttatctttcatcaactttcttatttcgacagcttcggctccccttcgccattaaaaaacctttggtcgctggcgattgaagaacagttttatatcatatggcccttcctgctgcttgcgggaatgtacatatgtaaaacacgggcccggcttgcggccgcggtcatgttcctcgcgttatgttcggcagtcgtaatgagtatgatgtatgtgcccggcggagatccgagccgcgtttattacgggacggatacccggtcatttgaattgctgatcggctgcgctttagctttagtgtggccgatgaaacgattatcttccaaacggctgccgagcagcatgaaacacctgcttcacgggacggagcttgccgcttttgccgcgctgctgctttgcgtcttttacacggatgaatatgaacccttcctgtacaagggcggcatgcttttgatcagcatcaccgcagcggttcttgtcgcatgtttatgccatccgagcagctttttgggacatgtcctttcatggaagccgcttcgctggatcggaacgagatcatacggaatctacctttggcattacccggttttcgtactgagcacacccgtgcaggaaatcggaaatccggtttattggcactgcgccgtcagaatcggcgccactttcattcttgccgagctatcttaccatttcattgaacagccgatccgcactgcgggcttccggccatttttacgccgcgtgtttctgaaccgctttctggaatggaagacgtcctctgtcatcagcagaatgtcgctcggcctcattcttgccgccattctcgtatttgcgggcgggctgtcagggatagccgaagagaaaaaacagccgcaatggacgtacgcgcagaatgatcagcaagaaaccgccgcctcttcgcacaaaacggccgatcacgatcagcctgcaaaagaagaagacagcaagaaaaaacacggcggcgaaaaaacggataccgcgtcagacaaaaacaagaaagaaccagcagacaaatcagatacgaagaaaaacgacgagaaaaaggaacggtcatctcaaaaaacggctgatccaaaacaaacacagcctcagcaagacgtgctggccatcggtgactcggtgatgctggacattgcgtcatacctgcggcagtccctccctcatgtcaccatcgacggaaaggtaggaagacaagtctctcaagcactccagctcacttcggaatatgcgtcatttaatcagccgaacaaagcggtcatcatcgagttagggacgaatggctatttcacaaacagccaaattgaatcactgatcagctccttttcaaaagccgatatctatcttgtcaacacgcgtgtaccgcggcagtgggaaagcaaagtaaacgaatcattgcgccggcaggccgagtcacgcaaaaatgtgacgcttgtcgattggcacgcaaaagcattgcagcaccctgaatacttcacaccggacggcgtccatctcatacctgagggatcaaaagcgctgacatccctcatcgttcaaacaatgaaatcatgacaaaaaaagaggccccaaaaaggcctctttttcgtatatcatcaggcaagtttctgtccgcaattcgggcaaaaattcgcgccttccgttttcgttccgcagttcggacagaatttcggcttagccgctccttccgagccgtttgcctgttcggtcccctgattctgctgactttgattttgctgcggctggttctgctgattttgattcatttggttcatcatttgatttgccacattcattcccatcatcatgcccgccatgtctgaggcggcgccgcttccgctcattttgccggatgacatgccgtccgtcatggaaatctgctgatagcggttcacatcgcccaccatgccgtaagaagcgtttttcgtaatcatatcctgaacttcctgcggatagttaaagctcataatattgaagcccgtaatcgacatgccgtctccgatcagctgcatatcaagatcttcttgaatcccttttccgatttcaaatgaattcgactgcagattgaacatgtcttttccttctctggtgatccatttcatcaaaagctgatcgagaatagacgtaatccggattttaatgtcctctactaaatagctgtctctgacacccgcaatcttatcaatcaatccgatgtagtcaatgaccttgaagttaaatgtgccgtttgcgcggatcggcataccgcccggcatacctgccgccggaatgttgatggcgttttttgtgccccacttcacggtgaactccttcgtattcacaaacagcacttccgcccgcatgccgctgttaaagccaaacttaaacccttttagtgtcgatagaaacggaatgatttctgattcgatatcataatcgccgtcatcacggaaaatcccttcaatcttcccgttgtataaaaagatggcatcctgtcccggccggatgatcagacggctgccttttttaatttcacggttgttccatttatagaaaaccatgtcgtctctgaattcttcccattccaccacatttgctaactgatttctgaaaaaacccatgtatgctcaaatcctttacatataatttaaaaacttcccttgcttccgctgtaactcgtgccgcccctcgtgactccgccgtcattgtcattatctttatctggctttttttctcttgtaatgtcggttcggatatatgtgtcgtgctggctcagcacttcagacgtatcgtgatccatatacgtgctgccggtgacggtgaccttgccgccggaattgtacaccatcacggtgacggcgattccggccgctgctgcagcgataatcagctgaaaccaccatgtgagcagcagattgtcagacctgtcgtccgggcttttccccatatctttataagccatcttgatgtaagtctgaaacgccttttcataatggcctgcggaaatatctgacgagatcgtatttctgatcgtattcagccggctgctgttcaaatacgtctccgcctttttatatccggagagaaatacttcccgatccttcatatcaatagtcaatatcgccgtgcttccgctaaaatgactgtcataaaaatcaccggcatactgttcgatctccttaccgcccgttccgtttgcggtaagaatgataaaatcggtatggcgcttttctcccagcttcccggccaattcctcaagtttcttcgtttcatccttcgttaataaatgagcattgtcataaacatattgcttctgttccgcggcagacgccgatgtatgtaaagaaaaagacagcatcagaaaaaggacgaagcagaagagacacgctttttttatcgatactttcatcaaaaaccgcctcctatcataagtgagacgagtcttaatgctaaaaacgcaccggcggttatgccgccgaaccacgcggccacttttccggcactgatcggcggtttgccgacaaccttgcccgtctgcccgttcatcgcaaaaatgtgctcagcccgctcatagtcgtagctgaccatccagaccggaagcagtacgtaaaagctgctgattttatcggtctgaatctgctcatccgtaatgtcagccgtcgtatacccggagaaggtggatctgatataagaatcaatataatggctgattttatccttcgcccgcggaaagagatcgtcatcggtataattgtacttttccgctatatatcccgctaaataggccgtattaaactccttcagctcactgtatgagtaaggctccaatttgtccattaattcatcattcattttttctgaagcgtcgaccggaattttgagataatcaagattgatatcgcggtacgcgttgtaatactcggtctccgtcacccggtattctccatcttcatagtgatgcactctcgtacaaacggcattgacctgaaccttgctgtttaagtcaaacatccaaaacggcacgtacatgccggttatgctcttcacccgatcggcagtcataaatcctttcggtgtcagacggccgtttcggcaccactttttaaaagcgctcatggcttcttctttactgatcgtaaaaggaatcaccatcgaaggcgcgagatttcccgataatcggtcggcgagaacggcggctcctccgcaaaacccgcacgtcgtggccgtcgtttccgcctcagtcattaataccgcgccgcagttctcacagcggtactcgttcgcctcattttcggaaaatctcgttgttatatactcttttggcaggctttcaatctgatcctgccgcccgcagctgtgacatgtcagcatgccggatgaactgtcaaagaccatatcatcgccgcagttcgggcatttataagaaatgatcattctgtttctctcactttctctttatatcggacaaagctgcagcccgctgtctattgatctttactgaaaagcattttctgcttaagcgccgccaactcatcgtcgacactgctttgattgctgtcatatttagccgtcagctcgtcaatatcgtctttcggagacgcgttgagctcagccatcgcattggcgtgatcaagcgcccggttgaccttgtcttccattctgccgaaagctgtcagcgattggcccgcatttgacacagaggaccccaatttgttcattctctcctgcgtttttgccacagaccacttcgctttgatggcatttcttcgcgactcaagctctccgatatcagcgacaagcttgtcatgcattttgcgcatttgagacgcgttggaagaagcgagctgataagccgtttgcagctcagtcagtcttgattcaacagccgttttcctttccaaaaatgtccgcgcatcggcttcattgccggcctgcaacgctttcatcgcgtaactttccatcttttcggcatcagcctggcattctgttaatgctcttttcgcccgctgttcctcagccatgacagaagccgtctccgctttcacttttcctaaatcactgttcagattccgtaaatattgatcaaccattttttcagggttttcagctttatccagcagcgcattgatattgcttgacataatgtctttaaatcttcctaaaatactcatttttcattttcctcccaaaattaaatagtaacaagttcacagttatatatactgtttttttcgaaaaaggtttcattttctcttgaatttatgtatttttatatgaaaatagtctcattcagcccatttgtgccggcggaaattcttcacgagcagatacagtgagaacaaagaataaacaaacagcccgatcatcaacccgctcactaacggataatgcttcgccgcatacacaaagaaatccagctgcgaaatctgttccggacttgtaatcgtatccgtcccattcaaaagctttgagaatttagccgtatcattccaatcaaacgagtcagaaacaagctcactcccctgataccaattgacagcggcgagacaaagaaaacaaaaaacagaaaacgcgcattgcacaataagaaaaacatgtttcataaaaaaattcctccgcggttcaatatcacaggccgtcacactgtacatgacggcagcagcagaaacttggttttactcagaactgataaaaacattattgtatgtacttcacagcggttcaatttactggatgcctttctaaagtataccgtatatcgaaaagggtttcagacctaaataaagaggatgcttcccgaagtccgatgactttcaagaaacatcctccatactttacagtgatacttcaacctcttttaagctcggcaaagcatcaatcgcaccgattttggtgcacacgagcgcccccgctttattggcaaatgagacaatatcacgcagcttcgcaaaatcttcggctgccgtctgaacctcatccgtgcgcgccagctgatacagcgccgcgccgacaaacgcatcgcccgctcccgttgagtctattgatgtcaccggaatgctcggaatgatgtcaatatccttcccatttgaaagaagggtcccgcttttccctagtgtcaccgccacaataccggccccaagctcatgaagaaccgcaacgccttctttatgatccttcgcaccgctgatgatctcaagctcttcgtcactgactttcacaaaatcacttacggcaatggctttttttgcggtgtttataaactctgaaactcttcctttccataaatcctcacggtagttaggatcgaaggaaataaactgtccattgtctttcgcaatcgacatcagccgtaaataggccgagcaaaacggatcagataacaatgccgtcgctgatccgaaatgaaggattttcgcatcgtttaccttttccagatcaatatcatcaagcgtaaacaaagcgtccgctcctctgttaaacacaaagtcgcgctccccgttttgttttaatgaaacaaacgcaagcgttgtaggcgctttctcatccatgacgagcatagacgtatcgacatgtacggcgtccaatgtctgcttcagaaagtacccgaacggatctttgcctgttttcccgctgaaagccgcgtctccgcccagcttagcaatggctgccgacacattcgccggtgcgccgccggcactttttaagaaattgcgcccttccgtcaaatcaacatccacatcggtacaaaagaaatcaattaacaattctccaatacaaataacagattgccttcccacattatcacactcatttatcaattctcgattatagtttcagtatagtgctttctgtcataaatacaaccgtttacatagaatattttaaattttacgtatacttatctggcagccctttgctccagatcagacatcatctgctgatattttttttcagttaaaggataaaaagaaataagaataatagacagcagaatgaacaatcccggaatgagcgcattcatatttttaatcgcattcaatgacgaggcggtctgatcggtattcgcggcatatccggcgattccgagataaacggccgaaaatgaccccgctaacgcaactccgagcttattgatgaaactcatgctcgaaatcaccacgccatcagcccggactccggttttccattccgcataatcgacacaatcggcaaccattccccaagcaagcgtatttaaaggcgtcgtgaaaaatcccgaaacgaaaagccaaaagaaaataaggggaatcgaggaatacgatgtaaactgaaggcccgcataagaaatcagcgataacgccgccgtgatgatcatgacctgcttccggccccgcttcttagaaaagaaaggaataaacagattgctgatcagcgctgcgccgaaaaacagcacggttcctaaaaacacaaattccttatggctgacgttatacgtaaaatagtacaccatcgtgctgagcttaatgttaaacccgatcgcaaaagctaaaaatgaagaaaccaaaatgagcaaaggcttgtttcggaacaaaacagacaacgtctttttcattccttgtttttttcttttttcaggctgaatccgttcccgcacggtaaagaagctgaacagattcaatgcgatgctcaccgccgcatagataagcgccgtcatctggaatccgaacgcctgatctttcccgccgatggcgtccgcaagcggtgtcgcacaggaaatcgataacagaattccgatataaaccaaaatcatccgggtcgtcgtcagaaccgtccgttcctccacagaattcgtcatccgacccgttaagctgttgaccggaatcgtctgcatgctgaaggacatcccaagcagaatataagtgatgtacgcataaaccatgttccctgtctcgccgaaatgaggagtcgtaaagcataagaacgtaaataacgcaaaaggaaacgccacccacaaaagatacggccttgcctttccccatcttgtattcgtcttgtctagaatcacgcccataatcgggtcaaaaatagcgtccagcacccttacgataagaaacaaagctgcgatgaccgcaggcttaatgccgccgacatctgtatagtagaataataagtatgcgtttacaaactgaaagataatattgtacgacatatcgccgaatccgtagccgatccgttccatccaggacaggccgcgatgtttcgtctttactgccgatgctttttctgtttcaatcatcatttcccaccccaagaatccgttttcatttttgataagcaagagggagaatgcaaagatcctccccgttcactcagcgatttggatacaccatcacttttaggcattcatttttgtattgaaaggcgcgttccatcgcctcttgcgtcttctccagcggatattggtccgttacaagatgcttcgtgtccactatgccggaagcgagaaattcaattcccttcggatacgtattcgcataacggaagattccgtatatatcaatctcgttatctgcaataaacggcacattgagcggaatctcgttctgagaaggcaaaccgacaatcgccagttttccgccccggcgcacggaagccagtgcggattgcaatgctgccggattccccgctgtttcccaggcagcatcaacgcctctgccattcgtgatcgttttgatttcttcaccggcatcctgttcccggacattgatgacatgcgtcgcgcccatttttttcgcggcatctaaccgcagcggctccaagtcggtcacaatgattgtgcctgccccgtatgctttcgctgccgcaacggccatcagccccacaggacccatgcccatgatcgcaaccgtggaaccgggctgaagcttcgttctcgcggccgcatgaatgccgacagaaaacggttcgatcaaagccgcatcttcataggaaagtgaatccggaatcgaaaaaacaaagtcctggcgcattttgatatattggacaaacgcgccgtcaaccggcggtgtcgccaaaaactgtacatccgggcaaagattataacgcccttctttgcacgcttcacagcgcccgcatgtgacaccgggttcgacggcgacccggtctcctattttaaattgatcgacagacgatccgacggcggcaatttctcccgcgcattcatgaccgaggataaatggtttttccactacataattgccgattctgccatttgtatagtaatgcagatcagatccgcaaattccgacagccatcaccttaatcaacacttcatcatgattgatgtcaggcacgggcaatgtttcgattttgatttctctcgtgctgtgcataaccgccgctttcatgttttgaggcactgtgtgagtcatttggcaaaatcctttctctgctttgaaatgtaagtgcatacatttttgttttctctgttactgcccctattttatctgcttttccatacgttcaacagcctttcctgctgtataaaaggacagccgcactgtactttttattttttcatatacaaaaaacactgaattgataaaatagtactaataggaggtgcaggctaatggctgaactagaaaaccggacacaatttgcagaactgctggcacctgccgtcaaatcgctgaaacttcatcctgattataaagtcagaaggaaaaagaacgaaaaaacaggacagtcttatatcgatcaaatcgcactccgattaggcgtttcctctaacacgatcaaaagctggatcggacagatgggcgcaaactacattcccggacgaattgacgacggaaagctgttcggcatgatctggatcattatcgaaaagactgacatggatactgaatggctgaccggccttctggaaaccaccaccattcccgtcatcaaacccgcattgcccgtttggacggcgtcttgtctaaaaaaagcaaaaatacaccggaaagacggatcattcggagcgccgagtgatgaagatgttgaaaaagcagtaaagcggctgtttcatgacagacccggccatgaaacgaatgcgcttacagaacagcccgtcacgcataacttaccgtcacgccggaccgggaactttatcggacgcggctttgatatagaggcgatccggcaatggatgctgtctccgtcaccggtctgtttaatcacaggctgggccggcatgggaaaaaccacaatcgctcttgaagcagcctacctttgtgccggcggttcaccagattggcctgcattcaacagcatcatttggatcagcgctgactggaaaggattgagcttcagcgattttttaaacacgatcgcctatcagctcggacgcgcagaacaaatagacaaatccatcaacgaaaaacggttcgtcgtccgtaatgcattagccgctcattcaaacgaaaaacccgtgctgctgatcgttgacagcatcgatacagcggaacgtgacattcacgaatttatcatcggtcttccggaaggcgtaaaagttctccttacggcacgggaaaacgtaaaacagacataccgggacggcctcggggaactggcggccatccagctgagcggccttgaacaaacggatgcccttgaatttttccatcaagaagtgcaccgctgtctgcaaacatgcaacctcccgcaaaaacgggaaaagctggagcagctgcggcggctatcgcctgaccttaagaatgaattcgtctcggcagccgccggcaacccgaaggccatggcactgagcattgcatacatgtcagacgacgacatccccgctccccagctcattcaagaacttaaacaagcgggctactcattattggaattgtttgaggttctctttggccgcacatgggacagatgtcatgaagacacacggaaactatggcagacgctttgctttttcgctaagccccctgatgaaaaaagcttggctcaagcggccggattagacgtccggcggtttcattacgcgattgagcaaatgcggtcatatgctttaatacagccggaacgaagcgaaggaagaattcaatacgcagcccatcaaaccgttgtcgcttacggagaacagcacttatccgaaaatcacgaatttgaaaaaggagcccgcagccgctgggcgcattattatatcgattatgcggaaacccatataaagcgggaacagcccaattctgtctattggagctatctgctgggacggaatttagagcaaatgaaaaaggaatggccgaacatcctaaaggtcatcgaatggtcgagtgaaaccggacaacatgacatcctgatcaaactcatcatccgcatcagccattttctaagcagaatcaacctgcccctgcgaatcgaatacggattaaaagccgccgatgccgcccgtcaatcaggcgaacacacgcgggaagcctacttcaggatcgacacggcaggctgggcgctgatggaagttaatgatgcggacgaagccctcaggcaaatagaagccggcctgaagatactcgaacaatcaggcgcgccggatcacgacgacttgaaagtatggggaatcgccctgcaatcgaggctgctgttaaaaaccggagaaccggacaaagcggcagcaatgctggacggcatcaaagatcagcccgtctcccccattatccggcacagggttcttctggtccgcggcgacctgagtttcgcccgctctcactacgaagaagccatcacattatacgaagcggcaaacacaaccagcgccgcatacggcggcgaaaaaacgatagaagcctatttcaacctgggcatggcttacgtcaagtgtgatcaactcgaaaaagcggaaaaagcctttgaacaaatgctctatgacaaacacaacgccaatcaagttgagttgatctattactattacggaatggcacagctgttgtatcgtaaaggagaaaatacgaaagcgatggaatcgaatcagaaggccattcgtctgattgattcgtgggagcctgggattgggattcggggtgaggtggagcagctgagaatggtgcttgaaggaaatgaggaaatcacattgtagttaggaaagtgtgaggtcaatcttagacaaacgatctcataccttctcttttttataaacaaaaaaggtcttatctagttgagtaactgataagacctttctgatagaacgctatgagcatttcaagtgaactcaacagtcaatcccttggtatacccaagggagattacatcatgccgcccataattaccacggttttcgctcgctttcgcaccctttcaatcggtgttatttttttagtgtgatcatgaatggaaaagaaacaaaaaccgcattgtttcagaccctgacgcaactttcgttatttttgtgttattttttaaaaaataacaggtttgtttgcatcgcgaacacacgttctttataatcgtctccaaggagatgaaacacaatgaccgattttgagcgtaaagtgtatcggattatttttaatatgacccgcttcgggaaaaatccctccatggaacaattgaaaaggaaaaccgggaaagatgagcagacgatccgtgctgctgtgaagaatttgatgaggcagcgcattttgaagtgggataagcataaaaacaggtggaattttaaataaaaaagaaagcagggtatctccctgctttctttagcgaatatgtagcgaatagtaataatagcgtatgtgttttctaatgtgtattcataatacatccaatatatatttcctgtcaagcaaaaaagcaattattttacaacttgtgcttgatcttctgattcagttattttagctaaccctaattcagaacataagatttgatttttggaactgccctttaatttacctttgcttaacacttttgtctcttcaacaataaagctcttttgtttaagttcctctaaaatctcactaataatctctgctggggtcgataatgtatttattagatatcttttgaaccaactcaagcctaagaacagatctccttgtgtaccaaagctatcgtgccatttctttatctcaacaagaatttgattcataagtttatctcggtcatactgcttttcttcaataccaagtaaactcgccaaatcttcagcatgatgagcataattcttaaattcaatatgtttaggagcgtttttagctgaataataaagctcaactctttttcccttgtacattaatctactcataataggaatcatgtcactatcagctgttacaaaaacataacaactaatcgaaggatccttgtatgtattttcaatagcatcaatacaaagttcaatatctgatgcatttttacgatgatccccatcttttccatttgaataaacatgccttatttgaacacgctttttttgaagacttgtcatattacttcttaatttgttaaaatccgcatacactctaaatgaacgtacattgtcttgaccgtatcgttcccataaccttgaaaataaatttttatcttcagattgataatctggatcatggctataattattcattagagaccagtaaacgttatcataatcaacaaaaatagctacattatcaagttttctttcagaattaaacgttcgattcgaatcgttcaccacagatgtcatgatttggaatgctgatttaagctgttcgtcaactgctggttgtggtaatggctgggcaaccgtccctgttcttttttcttttaattcgtccaattaaattccctcatttcattagaaataacacacataaaagaatttaccatatattcaccaataaaagtatattttttgacttcatactagcttaaaagttatgtatttctcccatttacaacaaaaaaagcctcgtccattggacgaggctatatcacttcaataatttttcaagtttcgcttttgttttcggcccataaatgccatcagcaggcagcccgtacatagactggaaccgtttgactgcatttgctgttttcgcgccatatgagccgtcaattccgaagttctttgcgctcttatcggggtaataatgaagagccgccagcgcggtttgaatctgttttacggcctcccctcgggtcaatgggcttgtcactttaaaaacacccgcaggcagactgaattttgatttttgagtggttttaggctttgaggcttttaccttcttttggccgccgcttttcagctcgttatcgcttttgatatatgagacattcacatatccgtggaatgtctggcctttagaattggtgtattcaacatatccccatccgttgacagttgatccaagctgatattttacaaccgtgccattcggcaggttaagcaccatggaagaagaggcgctccgttgtgtacgtaaaacaaggccatcgcttgaaaccaccgtgtttttgatgaatcttcctgtgtctgtatgggtaacatccggatttgatacaggcgccgttacaaccacaccatccattcgcttttcaacacggctcttaaaatcggcaaacccttgagagttgcttacccacggcgccgggcaaattttatgtgtaatgtcataatgtcgaacaatatcattggttggatcaagtttgtacattttgcacagctcggcacaaacttgtcctgcacgggcaatcgtatccggatggaaagtgccgttcttttcaatgcaaagctccacgccgatagataagaaatttgcattcggtttcagcgccgcgacaccccggtaaggctgcccgttgacgaattgctgaatgtcattcgcatgataggcaacctcattcaacggaatgatacaaatagcctctgtacgatcgacaaagatatgtgcagatgcaaacgtctgttttttctcagatagatttctgttctgtgcggggagcgtttggccaaaatatctataatgattggcagcaggcgcgccggggttggccgtgtaatgcaccacaagtttcttcacgccgttgtttttgattcccggccgcgtccatttattaatatcaatatattggtttctgtatgctgacataaaatctctcctattctgtttttggattcaaaaaagcagccggattaaccagccgcctgatcatctttttcttttgtctgatcgttgtcgctttcaattacgtgaagccggtcagtgatgacggccggaattttaacgccgatctgcgccaaattctccgtgatggacaggccctcatttgcgatataaaaaagaacggttccaaaggtcaggacgccgttcaaatttgttatcgtatcaataatgttggcgacgatgaccaccataaaactgagcatcttccgcacatacccaaaccacgcgctgcggctccggagctgcttcattttccacgctttgataatgccggtgatgacatccaagatgctgaggattagaagcaagtcaaggtacttcacctccccgaaaagatatgttcttgcgatctgtaagctttcaaaattcatccacacatgtattccctccattttgatcacctccttcgaggcaaaataaaaacacctattcagttacaggtgctggttcactattattttctttcgccgctactgccgcatttaattgcttttcgagttcctcgcgtttattatctgtaaacgtgtatagcgctttatattcggccagctcattgttcttcagattcaattcctgctgtagggaagcagctttatatgctgctatttgtaactggtcctgaagttgctcttttgtcatttcttgcatgcctttcactccttactcttgatcgggatacgcattaccgcgttcgctttctgtaatttcatcatattccgcttgtgtgatgcggcctttctcaacggcttttctcatttcaacggtcaaaacagttccgtttttccagcaatcctcaaaaaacccgaaaagagcacttcggttctccaatgggctccccccgtttccttttattgattcattaagagattgcaaacccgctgaaggtcaagaacttgttcctgcaacttttcctctgtagtcttttccttctctctatcttttgcttcaatatttaataccacgggctcaagcttcatctttgccatcctccttattttgaacatagattgttataagcccttctcggttgccttgtggatcaacgacaatttgaactggaatcataataagctttttgctcccactgtacccttgataataaccgtcaggctctacataagtttttgtgagcaaataacttatttcatcagcctttatatcatgaaggacatataattgatacgctacttttgttgtatcgtccggctgcagatcgaacgaaacagcctccatgggatatgtcttgtctcctttttttatagagccggcagttatttcaattcccgcgccggtttcttctatttcgatgccgtccgcataataaagactcatgttaaaatcccttttttcaaccataaaaattactcccttattgtgattcgtaaaaaataacaatttgaacctttattgtttttcccgcaactccggcagtagtcccggtccctctcactccaatatcaacagaactggcgcttatattttctaatcctaccgtaaccgcattagaatatgcgccaatcgctgtacctaccgccgcaaaaacgttctcaggcgcataatcaaaactatcaacaaaaggaatgcgattgtagcgcgcgtacgcagttgcccctccgtcaggcggcagtttaatgtcccaagtaaagcagtaaaccatcaaaccgtattgtaggcctccatgctcgtcttctaattctgtagaaacattgccacccatcaatttgaattcgcaattttttgcattccctgctacaactttggttcccaatggcagcgttaaatctgatgcatcaacaatcgttttttggcctgatttcagtcgaatgaccccggggacatcaatatctaaattattcggtttaaagcgataaatagtagctgatccttcaaaaagggcctgataacggttatatgtgaacggctctcctatatttttaggattggtagtagcagtaagaagaaaagcgtcttcttcaacagctgcctgtctttccattttcatattaaaatggcttataacttgtccaacatctcctatttctgaatacattgaaatagttggaaccgtttcatatgcggtttgcttgcctgcgccacggagctctattttgccatcaccaattgaaactgttctgtagatttcattataggaatcaccaggatcaaaaaactttccttgttcctgcgttattttcccagaactaacaatcaatttgttgtaaacataatgagagtctctggtgtactggtaaatcttatcgccttcgatatagtattcggcatcttctgattgtgtcagcgcctcgaaacgggccccttttatggtcaccccctcaatcgtgataccttttaacgtcccgacatttattttgtccgctgaaaggtctttgatcttggcgtttgttattgaaccgtcaatgatgtgtaccgaatcaattattgcttcttttagatgcgcctttgcgatagccgcattttgaatagccgctgtcccgatagccgcttcagctactttcgcacttgttatggctgcattttttatatgagctgtttctattaccgccttttggaggtggtcgccatcaataacaccatcaaccagctgagtatcaaacgggctataaccataatcagaaatgacatcgcctttgcgcacctgtaccttacgaataacaaagctacagggctcagtgtttccgtttcgattatatccgccgattccaattgtgtaatcagagccggtttccggagcagtaaatttgatattaacccttataaattggtcagacggaaaagcagaaatatctttctgttcatcgctgctaatctgtatgaaagtgctgccttttttcaaatgaatataacttatgtcggtggtattattccgttttatttcaaatgacagtgtatattgttgatctttgatcaatgccattctttgaatattaacaggcgatgacctgttcccgcatattccgaaagctattctagttgttccattgatgatctgagaaacagtcatttcattaaattctttttcctcaacactgtggctggtgtccgtataatcatagaaccatttagattttaaaagagagccaggtaagatattagcatcatcaaagtttcttgaaagtttatcagcatcaacggccagctgggccagtttttcctttgtgatcgctccgaaaacaatgtcatcagtcaaaatgcgctgagtggtcgcggaaaactgatccgtgaattcgctcgctgtgcctcgtgtgttgattgagcgcaagcgataataccaaacttcatttactcccgtaaaatgctcatatccgcctgttttgcctctgaaaatacgattctcttttaatggagtgaatccatttacttgtgaagcatatacctcataggctgcaatataactggacggatcataatcccatgtcagggccacattctgaaacattgccttgatcactacattcgacggaactggcggggctttgtcagggaaacttccatccgtaacctccccggcatccggtttgctttcccaagtaccgcggtttttttctatcacgctttcaatttgatcaatccggccgtctttttgtaatgctgataaaaattggccgatctcaacaacgcaagtattttcagggtcggtaatatcgtattccattgaaataatgcgctgcgatgtctcgattgggatagcgaagtttcgatcaattgcgatcgttgtatctcccaattccacatgttcgtgttcgtgtcccggcacgctctcaagcagctgcacagacaactcataattgatttctgtcttacatgcagtcgttatcaaatgattatatgtggcctttaaaagctcttccggctccgttatgtcttcatcattgtattggccttccctatggatcaactttccatctttaaggcgccccaatcgttctaataaatccggatcgccaacccattcctggcctaaaggcttatcgaccgggtcgccttttgattttttccattctacttcagagaaatcaataaaacgagaatagccgcccgtttcctctccttcctcatccgtagatgctatggatgccccgtaaccccaaagggctgtcaccgggtaactgataacagtccgccggatattcgttgtatccttatcactctcaaagcgcttcccgctgtctttaccgcgacggggaagtatttttatgattcgtttgacgaccttatttccatcaaattctatagtgtcctgaagctctccgccccatatattgatcacgtcagcaatacaatccaacgctgtttttttatagaaggtagtcgaattcactccaagctccgccgttacttccgccacccatcttgaccgagaaaggacgttgtccagtacaaactgagcagttttgttagttgggcggaaatcttttacaaatgtttcggcaagctccatcatggcagcctcacaggtaacctgggtgttaacctctccttcttcgtctgcatcatccagttccttgatgacaaacagacgcattacaccgtccttatccttgaataccacttgattctcttcgaataggaagcgcgcatcagggtgggaggcatcggctacaaaagaaaaagaagagcccttgttgagctcttctttgtatttcgcatcccagaacgtacaggtttctcgtccgtggctggacagcactgtcaataatttatcatctggtgaaagtatataaatgtcagccatgaccggacctccttacaaatatgcctcattaaatttgatgctgctcttatgactgaacttgattttaactggcgtcctaggcggcagcagaaaccaatctgattgaatttgaagtgctgtcatgattaaattaccgctgcaagtgacttttctttttgcagaatcaattacaagtgtgtcaccagcgatgaaatcgtacagcagcttgatcgttttcgatacagacccatcaccattaagaagagccacttcatatgaagtggctttctcttcaaagacgcattcgattgtcgggtctacggccgcatagcccggattagtgatagtctgaatacctgaattaaattcaaaatccttcgccgggccgtatttttttggatcaggacagataaaagtcaatgttgcagtctgaaagcctccctgttcttcgccttctgaaatgctttcaaagacagcattatagactctgtcaggctcatcgtgaaaaattaacggtttaggttcttcggtgtgcagaataaaagtcagttcctcctgctttttcttcagctcttcttcactgctgaaagcaaaaagaacctcaacggttatgactcttacaggaattcttgtgttccgcaggaaaccgccggggcgattcccgatagtggctgtattcacttctcttccggtcactccccggccgcccgtggacttcacataaaagaagggtgatatatcaatgccgtcaaacgtgattttccattgattaggcagcagttcctgataattgatcaattaaatctcgtcctccttgcgttcgaccttttctgagcgtctgtgaccggtttttctacgccttgaccgaccttcttgctgtccatctcaacaacaatcatcctgtcaggcaattcaaggttccggatgtccgcgctcaattcttttctaaccgtgccgagttcgctgctggaaatggatgtgtcatatgcaaaattcagatcctcctgctgaatagtcatggcatcactgacgacgcccatagctttctgaacagtgccgataccattctgaatccccacagcgataccggcaggaaccatgaccccgacctgatcccgcatcaatctggatggggaatggattttcaatttcttcttaatcgttttttcaattgtcgaggcgatggaatttgcttctttcgccagctcgcccttcatattcttcattccagaaataatgccggccattgtatttgaaccgatggcttttccgcttttcttgagagaaccaagctgttttacatccactgtaagctccccaattttgcggagatagtcatttttcaaaagtgccagttctttatttgcggcagaccgtaattcatttattttcttggtcgtcgcgttcttcaacccggttaattcttgagcagcctggtcactggccagcttgtgcttttctttccacagactgacatactcatttagctctgaatctgtcatgcgggctattgcattaatctgatcagctgacccgacacccatttctttcaattcgtctgtgaatgcctttggtgcccggcttgctatttttgtaatgtcagtgttgaacgttttgatcttgtccagctgctttttaagatttgaagtcagcttggagccgttcacattttgacttgagacatcgtcaaatagaccgatggcgttataaatcgcgtcagttcggtcttgcagctcctttttataggcatcgttggccgccttaatatcggcagtcagtttatcattcacttttttgaattttgagagataagtattgtttgcagaaagaatgcccttgttaagtttgtcagccgctttcttttcggcttccttctgctttctggccttatcagtcatagctttttgagtctgatagatttcccgttgaacctttatttgctggtcagaattcagcttgttcttcttcttgattttctcaagcgttttgatataggtattcccgctgatttttcctgtatcgtattttgcctcagctttcttaatctgatctgatactttcttggtatacgccagtttcgccttcgcttccttgcgctgctgctctttcagtagcttcttctgtttatcagaggcgcttttggatgcctgatatatctcgcgctggatttttcggttttgctcactggtcagcttgttttgcttctgaatcttctgcaatgttttgatatacgtatcggcgcccattttcttggtgtcatacttcacttcagcgttcttaattttgttggatacctttacctcagccgccttctgagccgctttcgctgcttttgccgcagccgcttttacttttccctgtgatttatcaatacctgccgccataccggtgccgacgtgataaccgacctggtcacgcattacccttgacggtgaatggattcccagaagctttttcatgccgttaggaattgcgtttgccattgatttaactttgctcgctaatgcacccgccatgccgctgataccatttattaagccttgtatgatgttgcggccaatggacttgaggttgatgcctctaaaaaatttcatgacactattccaaatgctgacgatacgttcttttgttgcttggatacggtttacgatttgcgctttcatgtaactaaatgctgtagaagccgcgcctttaatgccgttccaaatggacatcactttgcttttcactgtattccagaggcttattactctgtctctcgtcgctacaattctattgacgatttgcgcccgcatgtagttgaaggctgttacagctgcactttttaaagcattccagacagatgtcactttgctttttatcgcgttccacaaactgaccattttgtctctggttgcaataatccgattcacaatttgtgcgcgcatataggtgaaagcagtcactgcagcacttttcagagcattccatatggacgagactttactcttaattgcattccagatgctgatcattttatctctcgtcgcaatgatcctgttaacgatctgggcccgcatatacgtaaaggctgtgacagccgccgatttgagacctgaccaaattgatgtaacggtgttcttaatgccgttccatattgaagtcgcagtctttttaatcccattccagacagaagaggcaaacgattttatagcattccaaactgttgtgaaaatggttttgtacagattgaattcccacttaaaaaaagcagatagcccgttccaaatggttttagcagccgaaacaattccattccaaacagtggagaagaacgacgttattgcgttccatgttgatgttgccgctgttttaatgccttcccatacagattggagccactgagatatgacaccccaaacttgaagggtgtactgcttgaccttatcccaattggcaataatgagaacaactaaggctataaccgccgccgtaatccacccgataggccccattgcgatgacccatgatgctgccatgcgcgccgcatttgccgctgcttgagccgccagaatgaccaagcgtttaccaaataagatcatttgcttaattcctgccgccaacattgacacaaatgaactgatttttgccgcagtccacgccgctgccatacgtgttgcttgggctgctgattttgctgctaaaacagttattctggcaatgaaaagtcccatctgcttaatgccgtttttcagcattgttataaaagaaccgattttcatcgcagtccatgatgctgccattttcacagcattagctgttgcttttgctgccataacggtatatctcgcaatgaattgccctatagtaactatcgctgattttaattgggtgatcaatccggccattctaattccggatgcggcagaactgaaactccgaatatatcgagcagcagtcataaagtctttaagcccatttgttacagcactgactgctactatcgccggaacaatagctcttaaagcaccgattaatgaaatacccgccgcaatgaacttcccgattgccgggtttgcttccatcgccgcattagtaaatttcaaaaacccgtttacattctccaaaatcgttttgcctagtggagccatgccaacaagcaagttgatgatagttttcgcgatctgccccaatgtgctccatactgtagggccgttggttttaatatagtcaatgaacgattgaaattcttttgttttcgtaacgctgccagcccactcattgaaccgcttggtcaggtctacgagggatgtcatcatgtcttgagacataggagcgaatccagtaaacagctttgtcaggccgcccgaaaagtttctgataatctgcaacaattttgggccgttggtttttgtatactccacgaaagcctggaatttctttgaggagcctaagttcgctgaccatttcacccatgattgcgtcattccttcgatagactttgtcatgctctttccggtcggtccgaatgctacgatgagattgaaaactgtccgcaagacattcccggcagatcggccgaatgaagcaaacgccttcggagcttctttgttcagataggaaatgaatctctgcatgtccggagccttgaaagccttgtccatgctttttgccagtcccacgccctctttcgccagcccgtcaaacattggaatcagtgagttaagcgcgagtttgaacgtattaagagacataccgaatgtttttaagatcggcttttgaaccatcgtaccgatgtcccgccagttgtctttaaagtcttcgaggttctttaatgcctctctctcttcttttccaagagatttttgcagattattgatctgtttcatgattttagcgcgctcttttgcgcttgttgcattgtccagcttctcctgtagcttggaaaggtcttcggatgctttgaatacaccgcttatcgaagtaatagcaagggcgccgaatgccgccgcgcctgttcccgctgttgcaaatgcactggttaaccccattactccgccggctgccactccgagcatagggcccaatgagccgattgctccgacaatacttgcaagggctggcgagattgcaggaagtagggacgttaatgccccggcaattgaatgaccgatgaccgttgaaactgagtttgtgatcttggcaagcctgttcattgacgtttcaaaccgatcaattcgagcttctatactaatccatactcttctcggcaaggacgccagagcagcgcgtgccgttgccacagagcgcataagcgcagccgtgtttccgtttatgaccgtggtaattctgtttggcagtgaagccaaagctgaacggacagccgaaaccccgcgcatgataggcgacgtggccgcattaaaagtggtagttacgttatgagatactgatgctatggctgaccgcgcaacagcgacagcacgccctaaaggagtgggatttccgtctatcgtcgttgtgattctgttcgccaccgccgatagccctgctttagcgcgtgccaatgcggaagataacggccgcacattccccattaattgcgtggtgacagtttggggaatctgtcttaatctttgcttcgcccaattgatggcccgagttaaagggtctgaatccgcatctaaatcaactcgcgtgcgttgatgtcgatgaacaaagttatctatttgttgcgccgcctgccgtactcttgcctgaaagctggcaatctcggcgtcaacctcgactgtgtgatgatcagccatccggcgcattatatcgttgacacgatccatactgcgattaaattttcttgtctgtgcttcaactattgctgtcagtctttcgatcattccctcaccccattccttgtccgaattttgcaaagtggttgcggattgcatcattaaaccgctgaacccctttggctcgtttgccgagctcgtttacatctgacttgcgccatttgtcgttatcgccagtgatattgcgctccaattggcgtctggccttcttcgcatcaaacattttcgtttctttggggcgcttctcattcatggcgtaacgatgaaacatggcgtttcttgccataagctccaattcatctatttctcgcaacttggctcctttgagcagaagcttgtactcgttaggagtccatgacatgattaaatccacatcataaaccccgagccaatgtgcggagttcgtaattatttggtcgtagtcgatcccgttctctctttgtatgcctctttcatcatcttcaagacttccttgccgttctcttcgtcctccaaccgtttcgcttccatttccggtgtttcgttcggagctggtttcttccctttgttcatcttctccatcatcttccaacgctgacggattacgcctttgaaaaaacccgctgaatccagtgttgtgaatgcttcattgatcatcttgtcaattgcgtcgcctgtctcgtcttcatcaatgattttcatgattgcttcttcaatagcctcagttgatggcttttctttcttcaagtaagcgagtgcacaatcccaaaaagcagaaagataggaagcctcttcgttgagcagactcatgtaaatattcattgtgccgcctttgcccttttcgtccgcagtggaatatttttcgtttgccaatctgtcaaaagcaaagtcgcagcgtgatttgtattctttatctccgatagttaagtaagccatttataaaacctccgattatttttgtatgttaaaaaagagcccgggaagcccggaccctatgattccttttctgttcgtatcgtaaaattggccgatcgttccgattccccagccgagttcactgccgacacattaaaaatgtaggcagtgtccggcttcaggttaggattcgacgtgtacgaattctttgagacagtcgctatttttgcataaaacctgtaaatattgtaagatgtcgcccctttcaccgcatcccatgaaaaactcacctgatttgaagtggcgcttttcgcagttatattgcggggaacgttagggcgtaaccgcttgtgtttgcgtaacaatctcagtcattgaggactcacccgcatcgttcacagcagagacgttgaccgtgagtttcgtatcggccgcaattcctgtcaaggtgtgggatgtgccagtgacagttgcgtccagctgcttgctcgctcccctgtataccttatatgaagttgccccatctaccgcatcccatttcacggtcacgctgtcagctgtagccgtgaacgatagattttggggcgcattagggcgtagttgtttttttggcattctcgccaaactgcatgaactctttggcaccggcagaagatctgatctcgtcaattaattcttgaggcagaggatcaagttcacctttacgggtcttaccgagaacaggcaatgttgttgaaacctcaataaacccatcttgcggtgcacttttttctaagttctcgatgattgcatgtccatattcagaatcatgcttatcgtttttgtttttattcaggtttactttccatacctgaactgtctcttcgttgtcataagcatcttcaatcgccgtttgacccggatcagagacagcagcatagtatgtcagttcgatgctctcagatttagggccgtacccaacaattcggccagactttgttgattcatcttttgtatcttgttctttcgtatgactgccttctgtttggaatgcgataaacagaccttcagttgaagtagcattcatcggttgaacaaagtaaacctcatcaataccattcaataaatctgccattttgttcatcctctcaattgtttattgtgaagcgcattctgagaatgccgtgacgcgtgtacccgtcaatatcggtgatcacctgcatgctgcgcaactcagaacggcataaagaaaagccctctattgttaggggcctgcttgttaacgcttgaagcatgaggctcaaaatctccatcgcttctttttttccgttgtaacctgaccagcagtgtaaaaccacattgatttcttcaccgctggatgtcttggttttaaatggggatacatcatcatcgcccattgtcacataaggcttttgctgatctttcgggactgcatcaaagacgcccgtgacgcgcccgttcagctcttcgtctgttgataacctcttaaataaagcagcctgcaacggccacagggcagatcgcatgatgacagctcctttctatcacatttgactggcaaaataccgcatgccttcgtccaccgctggattccagaacggctgtgcccgcattccccgcgtgaccacccatctattaagcttggtgtcataataaacccacggcgtttgccggccgccgccttcctctgcgtaaatccctgttccgtattccacatatacggcataatcggcaccaacagaaataacggcccgtaagccgccctcttggtagtcgatttcaattgaatttttcaagttccccccgtctattgcggcggtcggagcattcagaacagcgtggctgtaaatcagctcggccgtgtctgtgaccagttgcttaatatcatctatgacccggcttctgaactcgcttgtggctctttgcatctgcctgacccatctaccactgacctcagccattgcccttcagcacccccgtaacctgacatttcaaattcataatctcatgcatgccgccctggtcgatcggatctgatttgagagtcagcaccttgttctcgtagatgatccgcattgtcttctcaatatcattgcgatacgggaaatacacattgaaatcaaccgggttctgaagctgctgagcctgataatattcccgggacgtaatcccgccgacaaaggcctctattgtgagataatcagtgaatttttcaacatagcccccgccgccgtccggcacctcttcccaacgctgaaatgtaacgatatgcgggaattcttcatagatcatatgactctcagctttctgtatggagcaagaagcttcgtaatgctgcttggcagctctgtttcataagaatatgagacatctcccatacttcggcctgaaaggttggaaggagtcatgttatgctcgatcgctttcgcgacatacagctttacccctgctggtaatttttcatctccattgaccatgaatgagttgttgcaccagtctttcgcttgatctatgaacagaggtaggacctcggccagataggtatcgtggctgtctgtttttatgccaagcatattttttacggtttgaacatccatagaatcacctacacttcaccgagaacaattttgatcagttcctctttaggcgctttgggatcaaattcatattcgttctccttaagaaaggcaacgatttcatccttattcacctttttcaattgctcttcagtcatatcaagaaggtttgtacccggccgttcattcagctctttagattgtttggcctcatccactctcttaaaaccaatgtgagaataaaccacctcaaaagccttttcagtgcattcaatagttttggaaccgttagatgctttcatatcacgcgccgcctccttccagtgcttttatccgattctctaaatcagatagtttggctttcacatcgtcaccgagtttagctaaagtaactgccttggcaccgatgttggcattttgtacactaccagtgccgatgttacgattttggacagaacagtcaccgatattgatgtttttcacttctccgtcgccgatcatttccgaagtgatagttttaggagcaggcgcagaacccgataacccagtcaccttcgcaccctcttttatttcgagctcgccgccgatcaccaatttgtcgccgttattagtgctatagtttttagatgtgtaccccataagcttacgcctccgttgctggtgtaatagcagcaaaagcatcatcggtcagtgtcatgaatccgacttgctgagttacacggagagcaaccatatctctctcatacaagttgatcgggtttccgtctgcatcgacaatcgttgtcaatgttgcatcctctgagattttgtattccatgccttgagggattccgtaacgtgtgtaattccagtcagccgcaagtaatgccgctttttcgtaatcccatgacttagaatccacatatccgatcggaaggccaagggcttgttgtgtggcgccgcctgtcgcatcgttgaagatcggaaggccgttaccgtccttagtgccgcggagcttttgacggaatcggcgtgttgttgtaaagccgtttacatctttgtcagcgtcttcaacaagagccatgaccccgtttaactcatcatatagattgccaagtgagtttaacgcaattgtgttaccagattccttgattttttcaaatacagatacgccttttccaaacggtgaatctacaccgaataacgcagcctgatcaaatttgatcgcaaaggcttcagcgatagcagggcgcatttgtgtgaagaaatctgttacagagtagcgcaagaattctttagaaacagggatgatgacacccaatttctttgaaatcatttttgctgttaaccattgagccttagaagtttggattctctcgccttctccaacccagtaagctcccggtccagaagccaagtacgtgaattccttctccggcttactcatttcttcatattttgctagttttgtgacagcagattgggtcataaactcttttaaaaccagcgttccttgttcggttggaaccttcccatttactgagtcttgcattaatgcattgtttggattaaatgttggcattaaaaatagccctccttattttctaatacttgcttcagctgcaagcgagctgatgtctaaatcttgatttgtcggttcattgctaccggactggacatcacggccattctcttgaaacttggattcaatagccttttgaagtgcagcattgtacttctcttcgaatgctccgaggttcttcatcgttgattcttcatcctcaccgataaagaattccactacatctgccggcagttgcttttcagaagcataagaaacagctttgtttaaaagcttttcacgttgtgccgctgtcttttgatcttccagctccttttcgagcttcctgatccgcttctgctcttctgtttcttctggataaagctcttttacctttgcatcaatcagagcatcgaggttgttcgccttccacgtatcaagaccttttgtaaaatgagaatccaaccgaggctgaatgagacgttttccttcttctgtatctaaaaacccattcaccttgtcagcagacacggcagaaagttcattcagatacgcctttacatcttcgttttctttattttcttcgagaaattttttcacatcttctaaagttggcattacgcttcttcctccttcgccctctacagtgcgcgcctgttatgagtgcatgaaaaataagccttttaacgtcatgctcaggacaaaataaaaagccgctgtttaacgtcttcccttttcctcaatggatttgtaccactcttcataggtttggtatggaattgtttggcctgccccactgccgccttccctcgcccttctcgtatccggcagcacaccgtttactttaaaagcaatcgtacaacggcaatttatgtcatctttcgcattattcatgtgccccggagccggcccgactccgccgtaaattgatttgaacagcccattgcgttctattgtcttcccgtccagtttcctgtgcccggctcgtgttttaagatcaagagtagcattccacatctttttaaggttgctccgttttgaggccttctcagcgctttccatcctcgccgagacttgtaccctatgagcttctgttctcgccacgtcacgggctttcctgcgggcaaattcggtcgctctttcaatgcggcgggcgatcttggaataatcctcccccgcttgtaggccctgtgcgacggaaatttgaatctgccggacataatcgtctcgatgccgcctgtaaatagctgacaaagtcaattcagctatagggtttagaatggcctgccgaatgacttcggctgtcgggatgctaaaacccaagttaaccacggattccatttcaaatagataagcagaacgcatataattctctaaaaactgcttggctgctaatgcctcaacaatagtcagaatggttttgaaagccttgtgagattcctcggccatcctctccatttccttgttcagacgattgtatttgttggcatcggctaaagtaagctggccgtccttgctgtacttcgcatacagccgggcaatttgtgcgttgatctcctttaagcgagacgcaaaaacgacatcaatcttctgagcatcctcagtgatcatgtcgtccaggtacttatcaatatcattctggttcatcttcatcaccgcccgcgtctgtttccacatccgttaacggcggcatgttgagcctgtattcctcttcttcctcttccatcttcttcagctcatactggacatcatcaacaaacgacagcagagataggcgagtttcttcgcttaccattcctttaagttgccctgtcgtttgtgcttcttccagtacatttgccggaaggtttcgcttaaatccgaaccaaacttttttataatcttccgctgccgctttccttttagtgccccatgcggaaaagatcagtttgtattgataacgcagagcagcagtcattttccgctccatcgtgatgcatttgttttcaagcgacatcaatttatatttcatcgcaacccctgaaacattcccaccaaaagattcatcggagaaattgaccgattttgcaaagcgaaggatattctcttccaacctatcaagatggttttctatgatggcatcgtttatatcctttgtcagatagcttacgtcatctttttcgtcaagcaattcaaggactccggtctttttgagctggtcaagcgtctcttcatcagcgcccaacccttttaaaatcaggtatgccagccgatattgctcaatctcattcgatgcatcggacaacgtgcggtcatacgcatcaattaacgaaagaaccttttcagcatctccctttagttccttgttattcgctaaaccgaataaggggcagccatcaaaaagatgcaatgtttttttatcaaaagtgaaggctgagctgtctttcgtactgaaataatagacatatttctgatcatagaattctgctttgatctttccgccgtacaccgtgtaatatcgcaaagcataagcaggttcatggatacttccatcagtaataaaggcgcattcccatggatcaatattttttatacgctcgtttccagaacgatcaacgtaagcgaggcgggcgccgtaaccgcaaatagaggccattttcccccactcgctgtcttcatcagcaatgttattttccatattaaaattttcgatcaactgttttacaggtattgcagtgcttgtcgtatcgctctcatcaaactcatatgcaatagggtggccgaacaaatagcccacctttgtatcaatgatttcagagtcaaacgagttgttaagcctattgtttactttgtgatcaatacgttttaattttcctgtttcaaaatcttcgtattcaatggcttctctggataagatcggaacgccttgaacctcagcctcgtaccgttcataaagctttttcattctgtcatgatccggcttatgttcctgaatgatcttgtcaatcaattcaggcgttatgccggactgttcaatcatgtctataaaatgattcatcagctcacccctctccgtcttttcggtttattatgcgaatacagagcgtaccggagtgagtccagcacgtcgtcccattccttaaccggttcgcctgtcttctgattccagacgtacataaagatttcttttttgaaccggtcaactttgtcttcaacaacaaaaagctgttcttgtttgaacagccgcgctacttcttctataccggatacgacagctttatcagcgttaatagcccgaagtttttcacgccggaaacgaacaacgtgttctggtcgtgccgtatcacaatagaaattaatgtttccgtaccgctcttttacgcctttcgctaccttcacccagtaatgaatttcctcatgttgcttggcatattcttcgagcaaataaaaacacccctggtcatcttgtccgattacaacaatagaacccgggtgctcatatccccagtcaacgcccgcaaaatacttcttgaaattgacgcgcctgttttccaattcctcagagctgatatagtggatgtccttattgaaatccttgtatatgactccttctggcgccacccaataaccgtgtatatcccgatctgtaaacatgccgctcggcgttgatgccacgatgctctccacatattccggatcgagaaaattgttgtcgaacagcgagaaatgaaatgacctgatgttcagccgcccgcttttcagcatttgcccgtctttgtcgatataatccgttttgacggtgtgcatcgggttttcgggatttgtatccatcatgaccacagcgcctttatacgagcaccgggaaatgacttctttcacgaatgaatcgtgcagggcagtcgcttcgtttaggaatgcgccggctgatgtgaacccccgcgcttttttccatgaatcagcattggctccatcaaagcaatatacacggttgccgaatatttcaacggcattcgacttgtcgagcctcaattctttacccagaatcagttccatatcgttcaagacatttcgttttatggctgcctgagtagccccgccgatgatgaaggataaacccatattttgatacttactgacgtgagcaaggaacgtcaaaaggagcacgaatgtttttcctgccctctttgcgccgctacaaattagaattttgggttgctctttaataaagctgtcccaaacttccttttgctttttattcagttccatcggcattcaccatttttctcaacattgcagcaatatcattttcttgggtgtttccatcgccgccattaacggtcttcttcgttttctcgatattcaagcgcatctgttccaatttaagacgccgctcatcttgctcatgcgccagctggtcaaattgcttgatcaagctccggagctcccccattgcccgagattgagcgtttaagagagtcgcatgacgatcccaagcgaactgtatttcaagttcttcttctacaatgtttttttcatatgttagattgccatcttcgtcctcatcttgatgataagcgtattttgcctttttaagctcttttgccgtatcatctttattctgcacaaacataatgcgctgcgcccgaataatagccgcatattgtatctgaatctgatcccatatcatatcagcaggggaacgctcctgaatctcttccatgatttcaagcgtttcttccggcagatactttgagaagaacccatgtgatacagcattttgatttcttgccggagccgccccgccgctatttcctaatgcgtttttgttgccgggttgcccgcctatttttgtgtgcacacttttttcggtgggtgcaccctttttcctttcccaaccatgccgctgcttccacgatttgatggtgttcactgacaccccgtatttttcggcaaggtccttgtatttcacgcctttgacgtaatccttatacgcctgaatgtgcttttcaaccatctacattcaccgccgcccccttctgattcgtgtttgttttggaaaatatattccctctaaaccgacgccgcactcagaccgttaaccacctatagttttcctgagacttaccggaaccggtttacaaggaacaaaaaaagcacccttaaaggtgcaggtgctggctttcatttgattctatttctttcataagcgaaaatataatatcagccttaattatataattcattggatacttaataactggttgctcctctttctcacaatttatatagtttactatttgagctgtattaataccaaccaccttattattataaataatggggccgccgctaaaacctccataactaaacatattgcccataaaatagtttaaatggttatggaacaaagacactttgccaaatgaataaataggaagatgctgatttgttaacataggattgacgacacctaaatcagaaaagtcaggataccctatcaaacatagatcatctcctggcgttaactttttatcagaaatgtgtttaaaatccaaaggtgtataatcggatgattctaaatttctcttaaattcaattgtctcattaaaattaagtgatataatagccaagtccatctcaaagtgattattttcataaactacaggcgcctctccagactcaccagatcctaatcgatatatttgatcgacccctacagttttgagattctcagcatatttgtttgctttgtttatagattcatggagctttcctgaatttctattcacaattagatgcttcacagtaataagatattgcttattaccttttttcacataaagagcagtaccaaagtcttgtttatcttcactgtaacattttaaatgaacaattgatttttctattcttttcaaatccatatttctctcaccacttctagaattaatctgaataatataatatgaacaaaagtaacttaatgaaacctatccttttttcttctgtttacttgccttccaatccatatactcatggaatactgtaggtcctgtcacatcgtattttctaccaatccgccacaactcatcttgcatatctttttcaatatcttcccatgatctatgcccttgtttctctaaaaaatcattaaattcttttaccattggcatcatattctcacctcccaccttattatcggttaaggagtgtgataaaggaactatttgcaaaatttgtcgaacgaaagcacttttcataaataggtggcaaccgtaagacaaaaaaacacccttttaacagggtgctcatttccgcctatgtttttggaaatctaaaatatcctctttcagaaaaagcctgtcccggggcatttctttcatcggctctaattccccggtctttactaactggttcagatactgacgggtgaaccccaatatctcaagcgcctcacttgtattgagtatctcttcattcaggaatttcttgattgcgtcacgctctttaggcttgtacatttttgaatcatccttttttctcacgatatttcaagtaaagggaaaatgctttctcgatgatcgaaacaacaaataaaatgatcagactaatgtcgagagccgttttcaacggtcccgctgccacatcctgacggaaaaacagcatatacgccagggcgagaagaacaacaatatcagtagtggactgtacacttttcatttttttgaaagtggctggctttcaagtatttttctttagtcgccgcatttgctatacttggagcaagggagaagcgctaccttctccctcggctcaaaatcatctgcgctttcttggacgtctgcgttttttgattttgggcttttttgctttaagcttttccctgatgatgaggactttctcaacaactgtgagagttgtgaggataatccccagtaccaatgcgatttcagccactttctttccctcctttctatacattaattatacatcgtttatttactcacgtcaagtaatttagtgggcttttttcattatttctccaataaaaaagagcctattcacgctaaacagaataggctgtgatctgctctatttttcattttcaggcgggaacgttcgatgttcttctgcacagttccttttttaatccccaataactgcgctatctcttcgaatgacatgttttgtacagcatgcatcatgaaaatgtctttttctctttcggtaagcacggatagggcatcagcgattctttccttatcccaatcacttacttctccctcagcttcttgaacgattgcgtattcttccggcagcgcatcaattaagcgaggttcagcaagaatcgtcctttgatatgcgtctcttctgtcagcacctcggcgtgcgcccggctgtcttccgttctgcagccattcaagagtgaattcaatatcgctgatcatgctactgataatctttttgtcgttgatctgttcagccgtcagattgacttcagccgtatctttgtagagccgatacatttttcttgtttctcttaaagctcgtttgtactcaatgattaaatcttgcattctgattcctccctttatttgcgcttaaatgcgccgcccttgcctcgtttaagtgtttgcatgtttgtgttcatcatttgttgccagaaacgatctgagcgctcctgcatgtttttattgggctttttctttttctgcttcatgtcatccctccgttcaaataaaaaacggacaccaatcagagcacagtgattctgtgcaatgatcagtgtccgcaggctttccgtcttggacttattcagttaaagcagcacatatgtagcaatgttcccgatgatcgctactatacaaattgcagttaagtgatttcttagctgtgaatccttatcctctcctataactcccataagagagactatcaggaccagcaagagagctattttaaaggctattaacatctctctcctcctaattaagacccatttgattcattccggatttaacagctagaggcaccacgtccgccggctccacatatggattcttcttgtattcctgatagtaagccacaatcagctttgacgtatggctaacaagctgcagttgtaaaggcatacccttttttaattcatcaacaatcatttgaagttcaatctcagaaaatccgttcatttgtcttccctcttctctatatacttatcaatatcttgaaaaaacgccgcggccgtgaatgcgatgattgcgcctattaacgtgatgtttgctttcatgtccggcctgtattcgtactggaaataaaaccagaaacctaaccccatcagcataaaaactattctcagcgccatcgaatcccccttatttgatttgaaattttgctgattcaaatgttccgatatagttccacttgccggaatcagagtagcagtccagctgaatgacataggtccctttcccggtcttattccggatcgttttcacgttgaatgatttcagaggcgttgccgttttgaagctgcctcgctgtaccagattcgtttcagtaagcccgccgccgctacgcttcttgtatacgccggccgtgtaataaagagtgcttgagccttttttctcggctttccagtccaccgttgaggcgccggccgtgtaagtcgcggcatccgtaaacacccggccgctgtacccggattcattttgccagccggaccatgctgcggaagcagacggcgcaacggccgcggctcccataagtaatacagctgatagaatgattgatttgaatagttttttcattattttccccttcctagttcacaaataattaacatttatttacaaggataatcattattttgctcgaattattactgtgttcaataaaaaacctaaggagtgtttaaaatgaatttcaaaaagactgctgttactgcactagcgattcctgtattagctttttccattagtggtatggcttccgctaaggagataactcctcaaaaaaatgaaacgcaaacaactatatctcctggtccaattaaagcctattacgatacctttgaagtgagagccgggggttctaaacaattagatgccaaatatttaggatcaggattcgcttatcattcagataatagcgctgttttcacagtagataccaatgggcttgtccgtggcaataaagctggaaatgcatatttaactatattcaaaaatggatcagtatacggtcagttacacgtatttgtctattaattttctaatagaagagcattctaatatgctcttctattttccacttcaccacctatgcagcgcccacaatgcgggcagcgggcatctgcgcggatttctaaatcaagttttttataatctcagtccgggcaatgatattcgatcatttactatccgcccattcatcaaagctgtaggggtaatcaacactttcaatgaaaccaatctccttcgccttctgacggattttcatacatccttcatagctgtaagcccatatttctttataatccctcagctcgccgcatttccctgttatgatgaattttctgaagctgttgaccagttgccacatgttgcccccatgcgaaaagccgtttgaactgccgtatcccaattcatacgggtaaacatcagcgcccgtgtaatcatcaacgaagaacagttttttcttaaatctgaaatacgctatgcgatcctttgacttgcggtagaatgtacgatgatcaatgcttgcgataagcttgatcaaatcgtttatgtcgttcattcgtttcaattgctctgctgttggcattgggttccctcctgatcaaataagctgagttgtgtgattttatagttaaatagcaataattcttcagccccgcggctttttccggatccgccgacaacctgtttgtatgcggaaaaggtttctgactcccagttcgggtagatctcgagtatcaaaggatcatcgtaataagaaagaaccactttccctttgacctgattaagcagccgggccagttcccgatgatcctcttcgttaaagccgccagcataaaaccgttcacgcccaacatatggcggatccacataaaacaaagtatccgggctatcgtatttctcgatgatgttacgaaaatccttacattcgatcatgacgcccttcatacggttggcgaaagactcgaaggcagcgcaggcgcttatgtatccgccagcagggttctgcccgctttgtgtgctatgcctccagcctgtctgcggcacttcctccacgttccccttactaatgccggagcgattcatataaaaccacctgacagcccggtcaaaatcattttgcgggtaatcttcagttttccatttctcatagagcgcccggctgtacggaatggattcgcaagcctgctgcatggcctttggatcctttctgacttgcatcaagaaattcaccacatggccgtcaatgtcgttatacacttcatgtcccatttgcggcttattcgctatgacatgagccgcgccgccgaaaggctcgacgtacaccttatgggcgggcattttatttatgatgtgatcggcgtatcgacctttgccgccaaaccagattaacggtgagcgtgccatcccttaacccccgatcaaattcggcagcacggagatagcgaagaagaaaagccccacgcatgccccgaccagccagatatttgttttatcccgtttagcgataatggtatggtcaccgatcattttcagatcgtcagaccgagcgaccagcgtcgggatgtaatccgggtgaacctttaaaagctcggccgcctgctcgacggtcatcgcttcgtccttcgtggccttcacgttccgttgtagttcgacttgtaatggcatcattttgcagcaccgcctaacatttcgggattctgatgtacgttgccgattaactcaccatacatttgaacaaaatcccaacgtattccacccgcataaaatccggcatcatcttctgaccatttaacgactagattaaacacccggccgtgtgatttataacagataatatctcccgcatatatttctttttccataagctttttgcccgtccataaatcgcggctgatcaactcgtaaccaaactcttcacaaaagacgggagacagtttgcgcgccgggcgttcttcaagctgactgatatagtacgttttcaattcaacattgcctgtttccttatgtcggaatacgtatcggatttttatgttattcattccgcagccccctccaatgcttttctggccgtttgccctccgtcgagttcgacagcaggcggacagtcttcaaattcgtttgtatacgtcgtttcattggcgtaaaattctaatgcgtttctataacgcttgttctccgcctgtagcaacttaatatcttcctgagcctgccgaaactgaatgaccgtgacatcctgctggcgctggtgctcccgattcatagcctgttgcatgattaactcttccgcgagcttttcggctgctgcttctaaagatatttgctccggtgtactggccgccgttttcgaaagggtgcaaatgtaagagccggtatataaaacctcaccttttgacaagttgattttgaattctttcatgcccgggcctcccggtctaaaagacatgttttgcatacaacccattgagctgaataatatatttttccgcagcgttcacacttgcgggcaatttcgttttgatacattttccgttcctcccccgcaggggaaaacccctgctaattgaatttatggccgatctcgtaatcacaacgagccaggccgccttttattgtttgaatgattgttttaccgtgttccggggcgtccattagatgagcagtcccttcagtgccatctaaaacgatgatgcggactttccccggctcgatgctttgctgaatagttgtttcatgattttttatttctgtcggcttgttcactctggccgccccctgtgctatgatagaagtaccagttcatatcagagcatcggggccacggcttcggtgcttttttacgttttacgacggcagccgcatcgttactccggcagatggttttaattcctcgcggtaaatgatcggatgcttttcgatgtaagctgccaattgctccggcgtcattttccacttcttaactggaccaggcttgtatcggttgatttcttcttgcatagcgataacctcctgaattgatttagttctcaagcatcaaactttctccacaaagcgttatggcaggatttccgttataatgacttccacccggggctcttcactgtaaaacttgctaactttcagatcgactacctggctatcatcccggtaaatcagatgattcagggcgtctttaactccctttacatagttgtcaacgtccggctttgttacgggacgcaggagacccttttccgcattttctctttttgtcttggaattagaaatttctttcgtcattggtctgaatactctgacatccattgccacaggtcccgtaataacttgttttggccgatactgtgacgccaccagcgcaacatattgtttaaaattctttgatttcaaaggatcacgcattttaaccttgccatttataacagatcccctcggccttccctgtgcaacaggctcgccgtaaactataaactgaatggaatccaaccgtcattacctcccgtcaatttgttcccagtgctgaatctgcttttccttgtacggcgctgtgaggatgatggccggcagcagtataaccgctttaagcactgtgcatcagctccatttgtttgattttttcctcaagcacccggatcgccggggtaaggtcctggccggccgtttgctcagcaggcccgaacacgtacatgccgccggttgctgtgaagttcgctttttccgtcattcccaatctcctaacctatggtttaattgcatccgatcgcccttgatggtcactgtgtaatctctgcacatttgatgaatgcgggagcccagcgcctcgtctatgtccaaaatttcccccgtatcaagctcggaagagattagcagaggcttatgattcaggtaccgataattcacaaccgattgaatttgttccacttgccaatccgtcgcccgcggctccccctttactggtttgaataagtcatcaatgaacagaacttcagctttccgcatagcgtcgagctttgtttccagctgatcaaagtcatttcgcagatcgcccattccctcaacgtacgggaaatacatgcagtaaattgattttttcttaatcaggttgttcatgatcgccgttaacaagtgcgtttttccgctgcccggctgcccgagcaaagcgatactgtttgaacgttttcccttgatgctctgaaaatccttatagtattccaccgcgcactcataagcgtccttgatcatatccggcttcccgtccttaatgaagtttccaaaaaggagcttttcgaattcctccgtgatgccgctggccttcataagccgggcgatctttttccgcttcacacactcgcattgcttggaaaatgtggttttccattctcgggccttatccggcaagcatactttccccgcaagataatcctcttctctgaccatttgatcaggggccaggctttccattgtcttatgctcttttctcaattggcgctcggtgtcttggtgaatacggtaaacaataatgcccttatccttgcagtcagagcactcgtattcagccttttcttctgaggcggcctgtcccgttgaagatgctgctgaccgatcccggagcttggttagaattgccttcattgccgcgtccatatcttgcgttttgcgagcttccatactgctgtttctcctttcgtctctggctgaatgggtttgagaggatggcttcaatgtaattcagattgacgttgttgcccttgaatctgaaagcctgtttcattgcctccatgactttctcttcaccgtaatcatccaccatatatccgagccgctgaacctccatcgtgccaatggtgcgggctgttttgttttcgaatagttcaaatgcgtttttcattttttcgtcaacctcctgctgtcctaaaggtattggagccgggtctatcttcttgttgtaatttccaagctgtatgtactcggcataattcaacaccgtcacaatgaaaccgcgtttttgcggcagccggtccagcttcaaatactcttgctttaccatccgatctaacgagtatttgatctgatcagaagaccagttgaagcgcttggctaaatctacaagcttaatgattgtctgcccgagctttagttcttgatctgccctgtactccgcccgtttgaataaataatcgtatattgtctcgtctcgtgaatctttaaatggcagccggggcaggaccacataccccaaaccttgcatatccatgccgctcacctacttcctttcacacagtgctgtcagagccttgaaatctacttctactaatctcagagacggctcatttgtctttaagtagtcagtcgtgtaccgggtatacaagtcctttctcaagtcgcgctgaaccgttttgaccagccagagataacaatgcgggataggaatcctgatcagctccctttccatcagctcaccaactccgaaaaatggatgatgctgttcagttgattagtggcccggcaatacttgcatttttcgcatcgctctggtttctctccgccgtgtttcacttgcaaaatccgatccatccgctgctcaatctcttcaagctctatttccagcctgccctcatcaatattgatgacagctttatcaggtggatcttcttttgaaacccctacgatcaggggctcaagccattcgctccgtccagtcatccgtttttcaatctctgcgtaaagcgccatctgagcgatgtatccgtatgcctcaacaaaagagcaatatcctatttccgggtcccaaactttctcccgcaatgaccgcgctgttttcagatcggagaaacggccgccagctgggttgtatacgtccagctttcctttccacggaacaccgaacaattcagcagttacgatgacttccttttctccttgaagaacaaacatacagagatcatcattttgaatcgcctcaatcatcagatcagctaactgatactgcttgtacagctggcccttttgtgtaaaaagtgatggggtgttctttttaaattcatcaaaagcctgttcaccctcaagccaggcatgaacgtattggccgaagaggagcgcctccgatgtgggcggcgtccattctccgttcaactttgccatcgtggcagcctcgcattgcaaaaagcttttatattgagaatttgacatgtagtgtctatcaatctcgttagagtaataattcttcttgttcagcgccggtatccgcattagcaggatcacccgccttttctttactatcagcaggcttgtcagcttgctctttcagctttttgaattcttcttcagcctttgatttagtcgcgctagtggccttcacattgaagtaatcctctttctttgccatcccatcacgcagggccgtgtaaatacgaccaattttcaggaaatcttgctcagtgaaggcatcaacattactgccgatgtactcctgaatcatttccttagtgatgccaaactcttttttaaaaagggagaaggcacttctgagtcggtcttccagtggttccttatgtccactaatcaatgttttttgacacatatctaccgccgcatcaacgatgtcgcccggaatcactccaagtatgcaagcacgaacccggcgggctccttgattggcaaccatttcgtaaatatcccttggatcatcaagtttggtaatggcgccccgtgccttccgttcatgcttcacagtgaaaattttggtttgccgggtattcgtttcaagatcccaagcgtaagccatgacagatgattcaccggccttttgttccaactccataattccgtaatcaatgttcccccagttctgtgccaaggcctcagccagccggatggatgggccggaaacctttgtgccgccgcgcggatattcatataccgcattctcagccaatagcctccgctcgcatgcttttttaatccggtcaaaagccgcgtatacgtcccgtgggaatttctttgcgataaccattgccgcttgtacttcttgagcctgtcggcttaccatcgcttccatagtcacgccagtagcctgctggggcgccggcatgtaatctgagtaatccacctgtgataatccattcattgtgcttctgccacctttcttttatatgcttccgttccaagccgctgccattcccgatagtgatccattgaagggaaactaaactgcgctttaccgtttttggagaatacaattgagccgccgacctgccttaaacgtcgctgatcctccgcacgctcactgaatgccactttaactgctttagccatgtataaaacctccattgttttttatggggcgttttggtataataggaatacaatcaattatcaaaacgccttacctagtccactctgccaagtgggcttttttattgctcatttttaaattcaaaaccaagatgctccttcagataccgctcaaggttttccctcaagatgatttcaccctcagcactatctatcacgtaatcatcgaaagccgttacttcatccccaaagtaatccttttgcgtgtccggctcagtcagtttgtcatgccagttgttcaagaccatcggattttcaatattcattgtgaacacctacttacaacactcaggtgaatcccgcgggccgccatatttaagacagtttgatgtaagcgccctttattcgtcagccggtttatatcctctgtaagaaccttgatgctccctgcaagactgatagcttcttcataatcgccatcccgcaacgcctccgcaagcatgatagagagcctttccgccgactcgattttcctttttgctgaatctgcatctgctttaagaaactgattgattttcataccagcaccgcctgcctttcttctgttttcgccattgcaacctgactcattagcgctttccgcgtccacctttcggccagttccttcatgttcagtccatgactacgggccagcgaatatatcagcgttttatttgctgggatcagatcaaaaatctgctttatatcggccatgggcagttcttcaggttgtcggcctggcctatcgtttgccaaccagcgcgctaaatgccttgttgcttgtaatgcttcttcaagctggtgaatcatattgattaccgccgcgcttgcactctcgttaagtgctggatcaattggcgccgccgtcgtcgggtgcaatttgaagagataatgtaccagatcaatatgttcgtatgcctcgcacgcctcaaaccacttaatgcataattccggggtaagcttactgaatccattttcaacgtccgaaacatatcgctgatcctttccccctatcaaattaccgatctgatactgtgcaagtcctgccgctttgcggacactacgcatgatccggggtagattatgcaaattgtatgggttgttctccatatgtttgcctcctgatatatccagttgttcactggtaaaatttaattaatgaagggacaagctagtccttttctcgaacattaatctccccaaatttgtggagattgtttcaagctgtttctgatgaaatgaatttattcacaaaataaatctgaccttttcccgtaacctttggcgttcgggtagttctaattgaaccatcagggttattcattgttctcttcttaatttcaaagagacccaaatccatacttcgctgtgttggtagattgaaagactcgcctgtcttacgaattaaataaccattatcacggagccattgaaataacttgttaggtccaatctttacgccgttctgttgaatgattttcgctaactcgccaacaagcacagatgattcagatgcttccacggcttcggcgaaaagagcttttggcttcatagattcaatttgcttattttgctcctttagtgcgtgaagagttgttttgaaaaataatttggtattttcgtctgcgttggacaaatacgtctgaatgaactgttcatcatttgcgacatatcccccggtttttctgattgtgggtataacttcaaaggctaaccaatcttgaaattgttcggcaatttgattagatgctctaaaagccagcttgtacaccaatggttcaggaataaaatcacctttctctacttctggaaagttatccggaaggtaagtattcacacggctccatcggattgttacgttgccacttttggcaacggtagtgaggcctaagttccgagcaacttgctcggcatcaaaaaggatttgatcattctcaattttggctgcaacttcgaaaatttcatttttgaatgtttgtaaattattcatgccgaagctcctttctgatagtatgcggtgttctcagcaacccaacgcgtgttgctctcaatccatttaaaaagcaaagtcgtagggatttttttgccacattcttcgttaaccggaaaatccggacgggccatcagttccgccattttagtgggaccgcaccgcagcacctccatcgcttcagttctcgtcaagatgtgaggaagctcgttcaaagagctgagccgctctaccagcatgtctgttgctctatcagcaattttggcagctatctgttcaatgaatttctcatcgtattgcatagtgaacatataaaaaacctcctttacaatgagctttataatctctcactttcatgtggtaaaatatgcatggaaggtggtgagatttaatggcttctactaaggtttacgcttgcctttgtggtgaatgggttgacttgactagtgatccggactgcaaaataggtgaatctatgtcttctccatacatatggtgggaagaaggtgcttcaatttggagccctaattctaaagaagagcacacgatgtatcagcaagattacgttaatatttattacaaaaatgctgaatatcgcattcacccaatgtttatccaaatcaagtattcatcctaaattcacgtttaaggttagcttctaacagttctgggtcgtcaaactgcaatttggcggctttagaactgaacagtacatcgacatgttgtttaacacggctccactcggattgggacataccattcaacaaatttttaatttgttccagctttttttgatccataacttcgacctcctatactgtttttttgtaactttcattcctaagcagttttctcgttaccctttttgtgtaacttttcattaaaaaaaagctcatcgacttcttcattcagtaactcggatatttggtgtgctttttcaagacttggctttgtacgccccatttctatatttgcataaccgcttgcgtatctatagccaagcttttttgccataaaagtttgggtctttccttgagaaagtcttgtagcccgtaatttttctagcactattaactcaccaccttactcttttcgtgtaactcgttaaatacataataatatacacaataagggtaagtcaacatatttttattctttttgtgtaagtaattatctcttgtgtgtaaaccgtgttaaaatttacacaccaaataaaaaaaggtgtataataatggataatataacagggaaaatcttaactgaattaagagaaaagaaaggctggagcaaatctttcgtcgcaaaaaaattaggtattaaaacaatgtctacatatgcgaactgggaatacggtttaaggaaaccagatggagaaatgctcgttagacttgcaagtttgtatggtgtaacaactgattatctcctaactggcaaagaacctacttttaataatgacctttttgatgatcctgatctacagatcgcctttagagaagcgagtgacttctcagaagaaagacaaaaacaagcaattgattttataaagtacctcaaagagaaagaagaacgtgaaggccgtaagcctaaaaagtaactaactgccgaaacctttatttatattattgttattatgttatttctgtttactaataagatcaggattggatcgggattagaaccgaactggatcggaaaagaatttttcaccagtaggttgaagccaattatatcaagggaaatagaattctttctcatctggattgcatctggattcaaacgggatctgatcagaaaaaaatatactcaagtgtattacttataaaggggaaattaaatttgtcttttttgatggaaaatggcgaaatctataactgtcagtttaaaaaacgcatgaaggcttctaaaaatttcttgaaaacttatgaagcagctaaacctctgattgatgaaagaaatgaaacaattcatgaactcgtttgcggaactatgaagagtgacgcgacatgggggcattttattgctacagaaaatcaagtatatttcattgtcttgaaaaagaaaaaaccaattttaaagaattggccctataaagaaataattaaaattactgccagtcgcaagccattaattggacataagattgattttaaaacagccgaagaagacttaaacatcaattcaatatcagaaggtgatattgacggctttatcaaatatgttgaatcaaaaatctctggcaatgaggaaagatacgaaagtgaaaaagaggatttaaagaaagaaactaaagaatactattttaaatcagcaaaaacaacaatcacacttgatggaaactatataagagtagcaagaaaaggcgctgttaacactatcacacgagggtatagtggggagaaatcttatagaatcagtgaactgtccgggcttcaaataaaaaaacctggattagtaacctcaggctattttcaatttttaacgccagctgctaatgaaacaagtggactctgggacgcaatacaagacgataactccttcacttttggcgcaaatgaactgcctatggttttagaaattcaaaaatacatagaagaacatcagtctattccagctccaacaataccaccagctcctgcccctactgtatctgcagctgatgaattgaaaaaatataaagaattgttggatatggatgctatcactcaagaagaatatgaaattaaaaagaaacagctattgaatttatgacagcccttcttcctcgggcttttctttcacaccaaaaacagaacatacattccctacatggtggtgtttttaatgtcaatccagttatcgtatcttgaagaagaagtgaaaaaaatctattacaaattaaatattgagactcctgaagacattgatttagaaaggattgccgcggcatttcgtatctggctgcattatgagcaaagagaaagctgcatgtttcaaattaacggtgagtatagcgttgtccttgatgctcgagcctctccgcaagaacagtggcaagactttgttcatgagctagggcatgtgattaaacattgcggaaaccagttcaacatgaatcgtatgtttcgccagttgcaagagtatcaggctaatagctttatgtatcatttctgtgtacctagttttatgcttgaaaagatttcgttgccacgcatgaaatcagaggttataaaattaataggtgatacctttaatgttacatatcaatttgctgctaaacggctcgatatgtatacaagaaaacagttctcattcttgatgtataaacagctctttaaaactattcattgaaaaattggggtgacaaaatgtatacagaggaattgatcaagggtaaaaaatggctggctgttggtgacggacctcgtgatcccgttaccggtaaacgcaaacaaattgcgcggcgtggcaaaacaaaaaaagaagctgaacaaagagttagagatgctattgatgccttaaaagaagatggcattgatgaatcagttgttaaaaaaatgactttcgaaaagcttgctgccgaatggttgaacgaatatgctctcacaggaaagaaaaaagcaactctgcgtattcgaaggaaagaaattaacatcttaaaccggtatatcgctaaaatcaatatcgctcaggtaacaggaagaaaatatcaaaaaatactcaacgatctcactgatcaagaatatgcccgtaccaccattagtggtgtgcatacgacagccggaatgatttttaaatacgctgtaaaggtgaagcttttaaaagataatccagtggctggcgctgtagttcctaaaaagagaatgacagtagaagatattgaaagtagtaaaatagagcaaaaatatcttgaaagggaagaacttgaagagttcctcttagcagtaaaagtccatggtttggaaatggaccttgaacgattttacttgctcgcttttacaggcatgcgttcaggggaaatgtgcgccctcaaacttcctgatataaattttgaaacaaaagagctgcgtatcactaaaaccatatattccgaagataacaatatgagaaattatgaattaactccgccgaaaacagccggatcggtgcgaactatcactctcgacgatcagataatagatatattgaaggcacatgtaaccaaacaaaagaagttgcgcctacagtccaggattgatccaagcgaataccacgacggtaatttcctatttgctcgtgagaatggctatccctttttaccaaaaaatatcattgtaagaatggaaagaatactggaaaaaacatcaattaaaaaacatgctactccccatatatttagacacacgtatatcagcatgctggccgaggcaaaagttgacttgccaactgtaatggaaagagttgggcatgacgacatgaaaacaacgatgaagatttatactcatgtaaccaaaaaaatgaaagaggatgcctcccacaaagtccagcagacttttggaaacatcctcaatttcgggatttcataaagaaatgttatttttttgttattttttcggttaattggggtgatgaaaaacggtcaaacccttggtgtatcaagggttttttccgtttgattacatcatgccgcccataccgcccatgccgcccatgtcaggcattcctgcgccgccggcgttttcttccggtttgtcagcgacaacggcttcagttgttaagagcattgctgctacagaagctgcgttttgcagggctgaacgtgtaacttttgtcgggtcaacgatacctttttcgatcatgtttacccattcgccggttgcagcgttgaagcctacgccgattttttcatttttcaggcgctcaacgatgacagatccttcaagtcctgcattgtgtgcgatttgacggatcggctcttcaagcgcgcgaagcacgatgttgatacctgtttgcgcatcgccttcagcttccactgcagcgactttgttgtatacattgacaagcgctgtaccaccgccggatacgataccttcttcaacagctgcgcgagttgagttgagggcgtcttcgatgcgaagtttacgctctttcagctcagtttcagtcgcagcgccgactttgatgacagctacgccgccggcaagtttcgcaagacgctcttgtaatttttctctgtcgaattcagaagttgtttcttccacttgagcgcggatttggttgacgcgagctgcgattttttcagtgtcgccggcgccttctacgattgttgtgttttctttcgttactacaactttagaagcgcgtcccaattgtccgatttcagtagatttcaggtcaaggcctaagtcttctgtgattacttctccgcctgtaagaacagagatgtcttcaagcattgctttacggcggtcaccgaagccaggagctttaacggcaacagcgttgaatgtgccgcgaagtttgttgacaacgagtgtagcaagagcttcaccttcaacatcttcagcgatcagaagcaatggtttgccttgctgtacaacttgctcaagcacaggaaggatttcttgaatgtttgtgatttttttgtctgtgattaagatgtaaggattgtcaagaaccgcttccatcttatcagagtcagtcaccatgtaaggagacgcatatccgcggtcgaattgcataccttccacaacttcaagctcagttgtgaagcctttagactcttcgattgtgatgacgccgtcgtttcctacgcgctccattgcttcagcgataaggcttccgacttcctcatcagcagcagagatcgcagcaacctgagcgatagactctttgccttcgatcggcttagaaatttcttttaagttttcgattgccacggttacggcttgttccatacctttacgtacgccgacagggttagctcccgcagttacgtttttcaggccttcgcggatcatagcctgcgcaagtacagtcgcagtcgtcgtaccgtcaccggcaacgtcgtttgttttgctggctacttcagctacaagcttcgcacccatgttttcaaacgcgtcttcaagttcaatttcttttgcgattgtcacaccgtcatttgtaattaacggagaaccgaattttttctccagaaccacgttacgtccttttggccctaaagttacttttacagcgtcagcaagcgcatcgacaccgcgaagcatagcgcggcgtgcttcttcactaaacttaatatcttttgccatgttaacgaaacctcctcgaatttttaaaaatatttatttgcttagccgattacagctaaaatgtcgctttcacgtaagattaagtattcagtaccttcgtatttcacttcagtaccggcgtattttgagaagataatgcggtcgccctcttttacttctaaagcaacgcgctctccgctttccaacacgcgacctgaaccggctgccacgattttgccttcttgcggcttttcttttgcagaatccggtaatacgattccgctggcagttttttcttcagattctacgagttcaatgacaacgcgatcacctaatggctttaacaatgtaataacctcctcaatagtatgaatatgtaattttagcactcagctctaaagagtgctaacacagttattataataaagaatctcacttccaatttcaagtcataagaataaaaaattttcacgcttacatgattctctctcgcactgattttctccttttttcacgtcaagttcacttgtgttacaataagaacaaataagttgattttataggataaaggagtacatatcatttgagaaaacagtattggtatatcattttgacatatgttatcatgcagctttccgcattgatcggcattcctttaatgtacaaattcggctatgcgggcgggcaccctacgaatgcgaatctcaccatggctcaggggatttattccgtcgtaagcttttttatctgcctgattatcgttctcttgattttgagaaccgcgccgaaacagacattaagaaacgggaagaaagcatccgccggcatgtccgttctctgggcggtcgcgggaatatggctcgctttattttctcagggaatcgccgggatgattgagcagtatgtctttcatgtgggcagcggttccgaaaacacgaaagccattcttaacattattaaagccatgccgctcatgattatcgtttcttctatcgtcgggccgattcttgaagaaatcattttccggaagatcatcttcggtgtattatatgaaaaaacgaatttctttatcgccggactgatcagttccgtcattttcggcattgtgcatcaagacctcacgcacctgctgctgtatacggccatgggctttacctttgcgttcttgtatgtgcagacgaaacggattattgtgccgatattcgcccatgtcatgatgaataccattgtcgtggtcatgcagctcggccccgcccaaaaatatattgaacagcatagtgagcaaatgcaattaattattggaggattgtttgtatgaggaacccaatgacttggggcttgatttatttcgcagtcggctgtatctttacgtatttggccgcaagctctccgggaagcatgtggtctttttattccatactgctgatggttttcgccgcttataatatcagcatctcgtttaaaatgttcgccttctcatttaaagtgaagaaaaaccaaaaataataaaagaaaagccatttctcatcattgagaaatggctttttttatgctgatacgtcctggtcagattcactgccggtctgccttttccgatacgccgcttttgaaatcaggatactgatctcgtataaaatgcaaagcggaatggtaatcatcaagtgagacagcagctcaggcggcgcaatcatcgcggcgatcacgagcagcacaaaatatgcgtacttcctgatcttcgataaaaacctcggcgtgataacaccgagtctcgttaaaaacatgatcagcaccggcatctgaaacagcagcccgaacggaatcgtcagctgcagcagaaaatgaaagtactcggtaatcccgattacctggttgacatccaggtcattcgagacccgcttcataaaatcaacgaccagcggaaataaaatataataagaaaacgacacaccgccgacaaacagcacgatcgaaatcggaatatagctgagtgttactttgcgctccttctcatacagacccgggctgacaaacgcccaaatctgatagagaataatcggcgaagtcaaaatgatgccgatgataaacgcgaactgcaaaaagataaacagcggatccgtcaggttaaaagcattaagggtgagctcttttacttcatcggctttttgaagatacacaatgataggttttgccagaaaaaagccggcaataaagaaaaccgtaaaggataacgccacaatcagcaatcgtttccgaagttcggcaatatgctccacaagcgtcatttgattcactctcatacgcgtcatcctatcttactgttcttctttctttttttcctcttcttcaccggctaatcccttagtagcgttcttaaattcacgaagcgtgtcccccgccgcttttcctaattcgggaagcttcttcggaccgaaaataatcaccgccaccacaccgataaccgccaggcttccaggaccgatcatgtgcagctcctcctttcgctattcaatttcttccaaaacagaataatgctttaagaaataaaccaatgattgaagctctactgctaaatctatatgatgaattcgaatgtgatccggcacattcaaacgggccggcgtaaagttaaggattcccttgattccgagtgacacgagccggtcggtgattgactgggcggcaaccgccggaacggtaagaatcgccacgggttcatcctttatgtgaagctctaaatcattaagatcaaagacaggcacaccgcctacctcagttcctattttactctgattcacatcaaaagccatagatatttttgtgttattattttttgtgaaattatagtgaagaaacgccgtccctaaatttccgacaccgatcaaaatgacgttcgtcgtttcatcctgatccagtgtttttctgaaaaatgacagcaggtaatccacattatagccgtatccttttttgccgagcgccccgaaataggaaaaatcccggcggatcgtggccgaatcgacttttaccgcatcgctcagttcagccgatgaaacgcgctgctttcctgacgcgtgtaaattctttaaaaagcgataataaagcggcagccgttttgccgtcgcctgtggaatttttgattgatccttgttcatgattggtcctccactttatactcagatgcatctcttttaaaatcaccgtttttgcctcctgttttttccatgaggcaggtcgggccgatgaccattcctttatccagcgccttgcacatgtcatacacggtcaaagcgcagactgaagcggaagttagcgcttccatttccacacctgtactccctttcgtttttacgcttgcctgtatatgaagaacggcttcggaatccttttcctcccagccgaatgaaatgtcgacgctgcttaaagaaagcgggtggcacatcgggataatcgctgacgtctgctttgcggccataattcctgccacctgtgcgacagccagcacgtctccttttccgatctcgcggtttttgattctgctgtacacgtcatgcttcatgtgtacgctggatatcgcagcggcagtacggactgttgaagatttatcgcttatatccaccatgcgggcacggccttcttcattaaaatgagaaaatccattcatatttaaactctccttacttctgatcatacactattttctccctgatgtcttatcctataatgttccaattctgatgtattgtttgctgacagcaggttgataagctacacttaacttattataacagaggtgaaataatatgatgatcttacaaattaatcagctatccaaatcttttggcgctgatcctattttaaacaatataaagcttgaagtcagatctcgggatcgcatcgccatagtaggcagaaacggagccggcaaatcaactctccttaaaattatcgcaggtcacctttcatatgaaaagggtgaattaatcaaaccgaaagaattaacgatgggatatcttgcccagcacacaggcttggaatcccagcttaccataaaagaagaactgctgagcgtttttgatttcctgaaagcaatggaaaaagagatgcgctctattgaagaaaagatggccacggccgcccccgcggagcttgaaacgctgatgaaaacctatgacaggcttcagcaggatttcaaggataaaggcggctatcaatatgaagcggacgtccgatctatccttcacggactcggcttcggaaaatttgacgattccgtgaaagtgcaaagcctgagcggcggtcagaaaacaaggcttgcgctcggaaaactgctgctgacccagcctgatctgcttattctggatgaaccgacgaaccatctcgacatcgatacgcttacatggcttgagcattatttacagggatattcaggcgcaatcctgatcgtttcccacgacagatactttcttgataaagtcgtcagccaagtgtacgaggtctcacggacagaaagcaaaaaatacctcggcaactacagcgcctatttagaacaaaaagctgagcagtatgagaaagacctgaagctgtatgaaaaacagcaggacgaaatcgccaagcttcaagattttgtcgaccgcaatctggccagagcttctacaacgaaaagagcccaaagcagacgaaaacagcttgaacggatggacgtcatggcaaagccgctcggggatgagaaatccgccgccttccgttttgacattacaaaacagagcggaaacgacgtcctgcgcgtacaggatctttccatcagctatgacggccagccgccgctcttgaaaaacctgaccttcggcattacaagaggcgaaagcgccgccctcgtcggaccgaacggaatcggcaaatcaaccttgctgaaaacgattatgaatacaatcagtccggaatccgggtcgatcacgtacggttccaatgtcacaatcggctattacgatcaggagcaggctgaactgacatcgtccaaacgcgtgctggacgagctgtgggatgaatatccggacatgccggaaaaagaaatcagaacatgcctcggcaactttctgttcagcggagacgatgtcctgaaaccggtccgttcgttaagcggcggggagaaagcaagagtcgcgcttgccaagctgatgcttcaaaaagcaaactttctcatccttgatgagccgacaaaccaccttgacctggacagtaaagaggtgctggaaaacgccctgatcgactacccgggaacactgttatttgtatcgcatgaccgctactttattaacaggatcgccacaagagtgctggagctgtcacctgatcatgcagaagaatatttgggagactatgattattacaccgagaaaaaagcacagcagctggaactggaagaaatgaagcggcaggaaaaggagcagactcagcctgccggcaaggtcaaacaggatacgaaaagaacttacgaggaagaaaaagaatggaagaagaaagaacggcagcgcctgagacgcattgaagaaatcgaagcggccgtctcatccgccgaagagaaaatcagtgccaatgaggagctgctgtgcgatcctgacgtgtatcaggatcatgaaaaagtacagaccattcacgcggagaatgaagcccagaatcaaaagctcgaaaacttattagcagaatgggaggaactctcctcagaagaatagaaaaagtcaagcacctctttaaggggtgcttttttatccacagctatcctccttgtcagccatttaagtaagcgttttatacacactatccacaaaattttctgactttatccactttactaacaactttcagtcccttatccagactggatttctgaatatattcacaatcctgtggatatgttagaattatctgttaataagtaaaaaaaagcctcacgttttacaacgtgagacgatcaaaggatgttaattccaaaccgggctgtccgttcatatcgtacgagccccggatccccttttcaaaagcaacggttccggcagccgcaatcatcgctgcattgtccgtgcataaagaaagcggcgggatgacaagctcgggatctcccgaatggctgaattcctgctgcagtgcggctctcaaccctttgttagcggctacgccccctgcaagcagcacttgtttaaccctgtattctttcgcggccttagaggtttttgccgtcagtacatcaatgacactctgctgaaagcttgcggcaagatcctccggaggaatcacctcatttttttgcgaggcgttatgaagcgtgttaatcacggctgatttcaggccgctgaagctgaaattgtaagacccttcttccagccacgcacgcggaagcggaatggaatccgttcccgcagcagccagcttatcaatctgcggccctcccggataaggaagccccatcgttcttgccactttgtcgtaagcttcgcctgcggcatcatccagcgtttcaccgataacctcgaatgaaccgtgttctttcatataaaccaattccgtatgtccgcctgacacaaccaaagcaagcgccgggaactgaagctctcctatcagcctgtttgcataaatatggcccgcaatgtgatggacgccgactaacggtatttgatgggcaaagcttaacgcctttgccgcattgaccccgattaacagggctccgacaagtccgggtccttccgttacggcaatcgcatcaagatcatcaaagcccatctccgcctttgaaagagcttcctcaatcacaagggtaatctgctccacatgatgtctggacgctatttcaggcacgaccccgccgaaacgtttatggctttcaatttgagaagcgacaacgtttgaaatgatgtcttttccgttttttacgactgaggccgcagtttcatcacagcttgtttcgattcctaatacataaatatcttgtttttcactcatgtaatgtcacccacattaataacgcatcttccccgttatctgtatagtattgttttctgattcctccggcctgaagaccgaatttcttatataaggattgggcgggatgatttgagaccctgacttcgagagagagccttcttgcctttttttctctgcacaattctatcgcagagcgaaacagcgcttctcccaacgattggccccgatattccggcttaatggctatgttcgtaatctgcgcgtcatctataataatccagattccgcaataccccgccagacagccgtccttttcaatgacaaggtagtgggcatacggattttccaaaagctcatgataaaatgaatccttcgtccacggagaagtaaaggatgctgtttcaatttcataaatttgatcaatatcttccggccgcatgcttcgaatcgccgttttcgttttcatccctatcaccctatttttgagattccatccatttcgcttcagcctctgccagacgcaaataatccggaacaaggctgtggacatccgcttcttctttttccaagcctaaaaacgccagctctgacggccgcggattatgctgtgcagccgttcctatcactgcttgatttgtcagcccatgcagaatggtttcttcatgaatggctgtatcatgccctaaaaataaaaccggagacgctttttctttcagcatgtcgagccaatcagtcaaaagcacattctgatcaggaagaacggattgtaagcggccgtcctgatattcataaagtcccgtatatacctgtccgcgccgggcatcaaataacgggcagatcagtccttgaaagtgccgtccgttagccgccagcacctccaggctcgagacagcggaaaccggaagcttcagcgaccatgccaatgtttttgccagcgtcacaccgattctgacacctgtgtacgatccaggtcctttcgccaccgctattttcgtaaggtcctgcggtgttaggccgcaatccttcagcaatgaattgacagcaggcatcgcccgcacggaatgattcttttttaaatatgtaatatactccgccatcaccgttttctctcgaacgagcgcggcacccagcgtgtaatttgacgtatcaattgccagtattgtcatgtttatttatctcctcacaaagcgtttcataccgtgttccgcaagccgtaaaggtaatgtcccttgcctcatcaccggctctcttgatgacgatctgcagccgttcagcaggcagctgatcctgaattaaatgagcccattcaattaaacagacgccttgtccctcaaaatattcttcaagccctaagtcttcgctttcatcctccatacgatacacgtccatatgatatagaggaatcgaaccgtcatggtattcttttataattgtaaaagtcgggctgtttaccactctcgtgattcccagtccttcggcaaaaccctttgtaaaagtcgtttttcccgcgcctaagtcgccttccagtgtcaaaatgtctcccggctttgccaaagaagcggcaagcttggctacggctttcgtttcttcggggtttttcgttctccattgtaatgtcttcaaagtgagtcacccgtcttatttaaaatgattgtatccttttttctcaaggacgatttgtctctgatcattggctgtcaaaagaacacatgcttccttccgttcagataccgcccctatcttcgcaatcggaatgcccgattgagtgcagtaatcaagcagagaggtccactcttgctgagaaaccgttccaaccaattcaaaatcttcaccgccgaataacacccatttcttccactcagaatctgcctcaggcaaatccggatgcaccggcagaagttgttcttcaatttctatcgtaactgaacttgccgcagctatttcatgcagctcactggccaatccgtcactgatatcattcagagccgcgcgctgaagctgagagcagaagcggccgacttgaactctcggaacgggccgtttatgtttttggataaaataatcactcgtatgaaaagcagaaggatgtgtttctcccaacaaaagagacagtcctgctgcggacgagccgatatcccccgtaacaaacacaacatccccgggtcttgccgagcttcgcagacaagcgcaatccttctcaacttctccgatgacagtaacggtaattacggcttgaccggaagcggagacggtatctcccccgatcaaatccatttgatatagtttcgccagttccgccattccttcatacattgcctggacgtcagctttctgccagcaagaaggaaccgctagagacaccaaataaaacttcggaatgcctcccatcgccgccacgtcactaatgttaacagcaagcgccttataaccgatatcatgaggagaggaatactctaatttaaaatggacattctccaccattgtatcaaggcagacaatttgctgcatgtggggtgacgctgtataaaccgcaccatcatcaccgatccctacatcgacggaaggatgataatgcgaatgcggtgtaatactgtgaatcaaatcaaactcatccatatatctcccgtcttcctttctgacgctcttgtgaaatacagctctttctagtgtatcggattatgtttcaatatccaagactttaacgatataaaagaaagcttggttagataccaagctgccagcattaaaagaaaacacaaaaaaaacgaaaacatgatcgtttcgtttacaataaaaatggcggtccggacgggactcgaacccgcgacctcctgcgtgacaggcaggcattctaaccaactgaactaccggaccatttaatttttggttgcgggggcaggatttgaacctgcgaccttcgggttatgagcccgacgagctaccgaactgctccaccccgcgatgataaaattttagaaaagcttggcggcgtcctactctcacagggggaaacccccgactaccatcggcgctgaagagcttaacttccgtgttcggcatgggaacgggtgtgacctcttcgctatcgccaccaaaccattgagagtgttctctcaaaactagataacagtaagcatacattcaaattggttaagtcctcgatcgattagtatctgtcagctccatgtgtcgccacacttccacctcagacctatcaacctgatcatctttcagggatcttacttccttgcggaatgggaaatctcatcttgaggggggcttcatgcttagatgctttcagcacttatcccgtccgcacatagctacccagcgatgcccttggcagaacaactggtacaccagcggtgcgtccatcccggtcctctcgtactaaggacagctcctctcaaatttcctgcgcccgcgacggatagggaccgaactgtctcacgacgttctgaacccagctcgcgtaccgctttaatgggcgaacagcccaacccttgggaccgactacagccccaggatgcgatgagccgacatcgaggtgccaaacctccccgtcgatgtggactcttgggggagataagcctgttatccccggggtagcttttatccgttgagcgatggcccttccatgcggaaccaccggatcactaagcccgactttcgtccctgctcgacttgtaggtctcgcagtcaagctcccttgtgcctttacactctgcgaatgatttccaaccattctgagggaacctttgggcgcctccgttaccttttaggaggcgaccgccccagtcaaactgcccacctgacactgtctccccgcccgataagggcggcgggttagaaggtcaatacagccagggtagtatcccaccgatgcctccaccgaagctggcgctccggtttccaaggctcctacctatcctgtacaagctgtaccaacattcaatatcaggctgcagtaaagctccacggggtctttccgtcctgtcgcgggtaacctgcatcttcacaggtactataatttcaccgagtctctcgttgagacagtgcccagatcgttgcgcctttcgtgcgggtcggaacttacccgacaaggaatttcgctaccttaggaccgttatagttacggccgccgtttactggggcttcaattcgcaccttcgcttacgctaagcgctcctcttaaccttccagcaccgggcaggcgtcagcccctatacttcgccttacggcttcgcagagacctgtgtttttgctaaacagtcgcctgggcctattcactgcggctctctcgggcttgcaccctaacagagcaccccttctcccgaagttacggggtcattttgccgagttccttaacgagagttctctcgatcaccttaggattctctcctcgcctacctgtgtcggtttgcggtacgggcacctctcacctcgctagaggcttttcttggcagtgtggaatcaggaacttcgctactataattcgctcgccatcacagctcagccttcacgggaaacggatttgcctatttcccagcctaactgcttggacgcggatatccaataccgcgcttaccctatcctcctgcgtccccccattgctcaaatggtgaggaggtggtacaggaatatcaacctgttatccatcgcctacgcctttcggcctcggcttaggtcccgactaaccctgagcggacgagccttcctcaggaaaccttaggcattcggtggaggggattctcacccctctttcgctactcataccggcattctcacttctaagcgctccacaagtccttccggtcttgcttcacagcccttagaacgctctcctaccactgttcgaagaacagtccgcagcttcggtgatacgtttagccccggtacattttcggcgcagagtcactcgaccagtgagctattacgcactctttaaatggtggctgcttctaagccaacatcctggttgtctaagcaactccacatccttttccacttaacgtatactttgggaccttagctggcggtctgggctgtttccctttcgactacggatcttatcactcgcagtctgactcccaaggataagtcatcggcattcggagtttgactgaattcggtaacccggtaggggcccctagtccaatcagtgctctacctccgagactcttaccttgaggctagccctaaagctatttcggagagaaccagctatctccaggttcgattggcatttcacccctacccacacctcatccccgcacttttcaacgtgcgtgggttcgggcctccattcagtgttacctgaacttcaccctggacatgggtagatcacctggtttcgggtctacgaccacgtactcaattcgccctattcagactcgctttcgctgcggctccgcatcttctgcttaaccttgcacgggatcgtaactcgccggttcattctacaaaaggcacgccatcacccgttaacgggctctgactacttgtaggcacacggtttcaggatctctttcactccccttccggggtgcttttcacctttccctcacggtactggttcactatcggtcactagggagtatttagccttgggagatggtcctcccggattccgacggaatttcacgtgttccgccgtactcaggatccactcaggagagaacgaagttttgactacagggctgttacctcctatggcgggcctttccagacctcttcatctacctcgttcctttgtaactccgtacagagtgtcctacaaccccaagaggcaagcctcttggtttgggctggtcccgtttcgctcgccgctactcagggaatcgcatttgctttctcttcctccgggtacttagatgtttcagttccccgggtctgccttctcatatcctatgtattcagatatggataccactccattacgagtggtgggtttccccattcggaaatctccggatcaaagcttgcttacagctccccgaagcatatcggtgttcgtcccgtccttcatcggctcctagtgccaaggcatccaccgtgcgccctttctaacttaaccgttaaaaagaatcactacgtgatatcttgcattactaattgaatgtgaattacttctgttatctagttttcaaagaacaatatctcgaagaatcgaatgatccttcaaaactaaacaagacagggaacgttctgtttataagacccaaggtcttatattccgttaaaatccttagaaaggaggtgatccagccgcaccttccgatacggctaccttgttacgacttcaccccaatcatctgtcccaccttcggcggctggctccataaaggttacctcaccgacttcgggtgttacaaactctcgtggtgtgacgggcggtgtgtacaaggcccgggaacgtattcaccgcggcatgctgatccgcgattactagcgattccagcttcacgcagtcgagttgcagactgcgatccgaactgagaacagatttgtgggattggcttaacctcgcggtttcgctgccctttgttctgtccattgtagcacgtgtgtagcccaggtcataaggggcatgatgatttgacgtcatccccaccttcctccggtttgtcaccggcagtcaccttagagtgcccaactgaatgctggcaactaagatcaagggttgcgctcgttgcgggacttaacccaacatctcacgacacgagctgacgacaaccatgcaccacctgtcactctgcccccgaaggggacgtcctatctctaggattgtcagaggatgtcaagacctggtaaggttcttcgcgttgcttcgaattaaaccacatgctccaccgcttgtgcgggcccccgtcaattcctttgagtttcagtcttgcgaccgtactccccaggcggagtgcttaatgcgttagctgcagcactaaggggcggaaaccccctaacacttagcactcatcgtttacggcgtggactaccagggtatctaatcctgttcgctccccacgctttcgctcctcagcgtcagttacagaccagagagtcgccttcgccactggtgttcctccacatctctacgcatttcaccgctacacgtggaattccactctcctcttctgcactcaagttccccagtttccaatgaccctccccggttgagccgggggctttcacatcagacttaagaaaccgcctgcgagccctttacgcccaataattccggacaacgcttgccacctacgtattaccgcggctgctggcacgtagttagccgtggctttctggttaggtaccgtcaaggtgccgccctatttgaacggcacttgttcttccctaacaacagagctttacgatccgaaaaccttcatcactcacgcggcgttgctccgtcagactttcgtccattgcggaagattccctactgctgcctcccgtaggagtctgggccgtgtctcagtcccagtgtggccgatcaccctctcaggtcggctacgcatcgtcgccttggtgagccgttacctcaccaactagctaatgcgccgcgggtccatctgtaagtggtagccgaagccaccttttatgtctgaaccatgcggttcagacaaccatccggtattagccccggtttcccggagttatcccagtcttacaggcaggttacccacgtgttactcacccgtccgccgctaacatcagggagcaagctcccatctgtccgctcgacttgcatgtattaggcacgccgccagcgttcgtcctgagccaggatcaaactctccgataaagtagtttgactgactacgcacatcgctgtgcgatttatttaaaactttgaattaacaggtacgttttgtcttgtttagttttcaaagatcattataatggagcgggtgatgagaatcgaactcacgacatcagcttggaaggctgaggttttaccactaaactacacccgcatttgaattggcgcgcccgagaggagtcgaacccctaaccttttgatccgtagtcaaacgctctatccaattgagctacgggcgcttatcaggcgacttaactatcatactaccaatcagttatgatgtcaagtgttattttatttcttttcgaagtcttttttctcgacctcatttattatacacgctttcgagaatttgtaaagtcttttttaaaaagatcattttctcatttgtcgttatcgctttgttcatcagcgacgtttaataatataccacgcactttaaattaggtcaacacttttacgaaactttttttccgcttattattcccttctatataataaataaaaagcaggattcccaggaaccccgcgtctattcagattacccgctcacctcggcttctgcgctattacgatctgttttttcataggtacggaagttttgttcaagctgttcgagcgaaagacctttcgtttccggaaggaaccttttcacaaatataacggacgctatccctaacaggacaaaaatgaagaaggttgcagacaatccgatgtttgcgagcatgaccggaaaagttaaaccaacaatgaagttcacgatccagaggcagaagacagtcacccccataccaagcccccgcaatcgcagcgggaatatctccgacagcatcagccaggtcaccggagagacagccccctgctgaaacgcaaggaaagtgactgttaatgaaagaaccacataaggaagagcaggcgatcctttcagcacgacagacagaactccgatcaaaagcagcaccgcagtcgttccgatcagccccgtcatcagcatcgggcggcggccgactttgccgagaagccatattcccacaaaagtcgcgagcaccgaaatcacaccgttagcgatattgccgattaatgcggcttttgtctcaaaaccggcatcttttaaaatttgagttccataatacataattgaattcacgccggtgagctgctgcactaccgcaattccgatcccgataaacacaatgcggcgcacccacggaacggcaagatccttaaaggtcgcctgctccatctgagcttccttatgaaaggcagattcaatctcagcgagctcagacttcgctttctcttcattccttattcgccggagaacgtgcaaagcatcttcttttcttcctttagaaaccagccagcgcggactttcaggaactttcagcataccgaaaaacaagaataccgccggaagggccgcgataacgagcatataacgccaagcgtgagaggtatcaccaagcacattgccgatgatagcattacacgtgaaggcaagcagctggcccgttacaatcatcaattcattttgggtaaccattctccctcggctttccgccggcgacatttcagccaaatatgccggaacggttacggatgctcccccgacggcaagccccagcagaaaacgggagatgatcataaccgatacgttaggcgccagtgtacatccaagcgtcgctataaagaacaaaacggcaaggataaggatatttttacgtctgccgttatagtccgacaatctccctccgaaaaccgcgccgatcgcagcgcccaagagcagggagctcgccaccatcccttcagtcaaagcggtaagattaagctggtcagcttccgccataaacggcagcgccccattaatcacaccggtatcgtagccgaaaagaagccccccgaatgtcgatactaaaatgatggttctcaaaaatgaatgctggctgctatttttattcatcttcaaatcctcctagtttttacacagagataatatcggaatattcagttatcaatatttacacctctaacgtctgcatacaaggtctgaccgtccaaaacagttatataagaagaaaatgttccgaaagcgttatcatttatagtgattattcgctctccccctctcgtcatattgttattttatagttactttgtagtgaagttataatgatattattggtacttatgttaatatcataattttaaaagcgctttcagtcaataaatatttcagaaaattttataactcacctttatatcacctatatataatcaattttcgttttatatcaatttatttccataatatactcaattaattacccctattataatcaataattgattacatattgaaaacccccaactgctgattgggggtttttgttttattcttcgtttattgtaacaatcgttctccctctcgcttctccttttaaaagggcaggaagcgtatccggcagctcttcaagtgtaatttccttttgaataaaggcctccagatctgcaggcttgaagtcatcagctaaacgctgccatgttttctttcttgtctccatcggacagaatacggaatcaattcccaagagactgacgccgcgcaatataaacggaaagactgtagccgggagtttcgttcccgctgtcagtccgctcacagcaactgatccgccgtactgaatctgactgagaactgaagcaagcggctcacctccgaccggatcgacggccgctgcccatttttgtttttgcattggttttaacgtgccgttatacacttcgtcgcggtgaatgaccgtctttgctccgaggctcttcaaatacccgctttcttcttcttttcccgtactggcctcgacctcataacctaaggttgaaagaatggagacggcaaagcttccgacgccccctgtcgctcccgtcaccagcacctttcctttttcaggagcggcatggttttcttcaagacgctggacggacaatgcggcagtgaagccggcggttccgatcgtcatggcttctttaagtgtcagaccttcaggcagcggcacgatccaatctgccggaatgcgggccagcccgctatagccgccaaaatgggaaacgcctatgccgtagcttgtcgcaatgactttgtccccttctttaaaacgggcgtcatctgaagaaacgacgattcccgctaaatcaattcccggcacgaaaggatacgaggttacgatcttgccgtcaggaatggcagccaagctgtctttataattcacccctgagtagcaaaccttaatcagcacttcaccctcgggaaggtcctgaaccgccagctcccgtacgctgactgaaaaccggtcttcacgctgatcgactactaacgctttaaattgatctgtcatcactacgtctccttaaaatgaattgaatggctttggaaaagcataaaataagtttgatttgttttcaaatgtcctgccctgtgtagtatgatcaaaagtaaaaacagcgaaagagtggttacgcatcatgtctgataaacaaaacaaagataacaaaaacaacaacagcaatcagccattaccggacattattcataccgccgttttcaaggcgccgatacaagttgtctgggatacggtctctacggcggacggcctgtctctctggtttatgccgaatgatttcacgcctcaagaagacagtgagtttcagctggaatctccgttcggtccgtctccgtgcaagctgctggatattgaagcgccgtaccgcctttctttttcgtgggatacggaaggctggatcgtctcttttgtcttaaaggaaacggaaagcggagatacggaattcactctcattcacggcggatggaaagagccggaagccgtcatcaataaagtcaatcggaaaagctccgagattcacagtacgatggatcaaggatggaacgggcttgtcaacacgaaacttcgcggggcggttgaggcttaacacaaaaggacggacacgctttccgtcctttttttgatgccgatacataaaaactgactttgcaaagacactaacagaagaaccgaaaacttctttcagggggcgctgtttatgtattattacaaagaagagctgatcaatatcattaaaccggacaagccggacccggccgcggccaaggtgcttcaggaaattttaggcgggcattacggggaaatgcggacgatgatgcaatactttttccaaagctctaatttcagaggaaaagaaaagcagttccgcgacctgcttcgcggcgtatttttagaagaaattgcacacgttgagctcgtccagcatacgattaatgcgctgctggatgaaagcggcgctgagggcgccggaaatcaggcagcagatcaggcgccgctagacgaagcggttaaacacgccaatccgcaccattatattatcggggcgcaaagttctcttcctgccgatgcaagcggcaatccatggaacgggtcttgggtatacaaccacgggaatctgatttccgatctattggacaatgtcgtgctggaatcaaccggcgtgctgcaaaagacgcgcatttatgaaatgagctcaaaccagacgttcagagaaacactcggttttctgatcgtccgtgacaacgcccatcaaaatgcatttacaaaagcgctggaaacactgggtgtcgaatggggcaaattatttcccgtgccgaattatgatattgaaaaatacccggaatgccggaaattcgttgaaatgggttatcataatacccaatttaatttcagactggatccgacacggatcggagaaattctgcagggaacgacgccgagccgaaacggcggcgaattaagtgtgtcagagcctcctaaaggtttccccgtgccggaacttcccgagcttccgaatgagcacagccccggactgaaagatatgaacttgtaacaaaaaacgcctgtttcgggcgttttttgtttttctgaatatgaggtttgaatgtgttcaaaacggggaatataagccgggagatcttgccatacggccgtgattttgatgtgagcacatttctgtacatacttcgtttcgaaagttgtcctaattttccagccggccggctgggtatgtttgaatgataatgggaattatgtaaagagaacaatgtcttttttaaggaggcagcgaatgtctaagcaaggaaacttccagaaaactatgtcactttttgatcttattttaatcggcatgggagccatattcggttcggcatggctgtttgccgtcagtaacgtcgcctctaaagcgggcccgtcaggcgttttttcctggctgatcggcgggggaatcatcttattgatcggcttggtttatgcggaactgggcgccgcgctgccgcggaccgggggaattatccggtatcccgtatattcacacggacacctggtcggatatttaatttcctttgtcaccattgtggcatacacgagtcttatttctatagaagtaacggcggtccgccaatacgtggcgtattggtttcccggtttgaccgtaaaaggctctgattctccgacaattgccggatggatattgcaatttgcgctgctctgcctgttcttcctcctcaattactggagtgtcaaaacctttgcgaaagcaaacttcattatttcgatttttaaatatgtcgtaccgattacggtaattgttgtactgatttttcattttcacccgggcaatatgaccgttcacggattcgcgccttttggtttcaccggaattcaggccgcgatttccacaggcggcgtcatgtttgcataccttgggctgcatccgattgtggctgtcgcgagtgaagtgcagaatccgaagcggaacattccgattgcattgattgtttgtattatcgtttctactattatttataccgtgctgcagctcacttttatcggggcgatcccgggggataccctgaagcacggatggccggctatcgggactgaattctcccttccgttcaaagatatcgccgtcttgctcggtttggggtggctggcgacattggtcattttagatgcgattttatcaccgggcggtaacggaaatatctttatgaatacgacttcacgtctcgtctatgcctgggccagaaacggaacattattcagcattttttctaaagtcaataaagaaaccgggacaccgcgtgcctccctttggctttcgttcggtctggctgttttttggacgcttccgttcccttcttggaacgctcttgttaacgtatgctccgtcgcattgattctgtcttatgcgattgcgccgatttcttctgcggcgctgagagtcaacgcaaagaacattaacagaccgttttatttaaaagggatgagcatcatcgggccgctgtcgtttatttttacctcttatattgtatattggtccggatggcgcaccgtatcctggcttctcggttctcaaattgtcatgtttctgatctatctctgtttcagtaaatatgctcccaaagatgatgtcagcatacgccagcagctgaaatcagcatggtggatcgtcggcttttatgtcatgatgctgattttctcctatctcggctcgttcggccacggattgggcattatcagcaatccgcttgacctgattctgatcgccatcggttcgctcggtatttattactgggcaaaatatacaggtctgccgaaggctatgatcgacagtgataaatgacgaatgccggaaagaagtatggtcttctttccggtatttttatgttaagggatgacaaaaaagcgaacatgcgataaaatgaatgacagtcattcataaaaggaggaacccctctattggcaaaacaaagctcgggaaaatacgaaaagatcctgcaagccgcgattgaagtcatttctgaaaaaggattagacaaagcatccatttcagaaatcgtcaaaaaagccggaacggcccaaggtacgttttacttatatttttcttctaaaaacgcactgatatccgcgattgcagaaaacctgctcgacactacgctggacagaataaaagggaaaacggacggttctgaagatttttggacgttgctggacattttggtagatgagacatttcacatcacccggcttcataaagatattatcgttctctgttattccggtcttgccatcgatcattcaatggagaaatgggaagccatttatcagccttattattcctggctggaaggcatgatcaatacggccattgaacagggtgaggtcatcagcggcattcatgtcagatggacggccagaacgattatcaacgttgtcgagaacgcggctgaacggttttatatcggctgtgaacaggatgtcgatctcgaagtatataaaaaagaaatattcagctttctcaaaagaagcttgcagaaatgattggcggagaccgatcatttttgaccgccgtaaaaatgactgacattcattcataactgaggtgactgtatcatgtattggctgcttgtattgatagccggattgttagaagtagtttgggcgtccgccctgaagcatgcggattcgctctttgattggattggtattttccttttgattgccgtcagctttctgatgctgatccgctcttataaaaaaattccgatggctgccgcatataccgtttttgtcggaataggcaccgtcggcacatatgtaacgggcgtcattttaggcgaatcgttttcaatcggacaaatattctttttggctttgctgttgtccggcattttaggaatgaaggtatttacgaaagaaactgaaacaaggggtgaacattaatggcatggctgctgttatttattgccggagcggaggaagttgtagcggccgttgccatgaaacatattgacggttttaaaaaaaagtggccgctgattgtcatggtaacaggctttatgctttcattcttttgcctttccggagcgatgcaggttcttcccacaggtgtcgcgtatgcggcttggaccggcatgggaagcatcggcgtttcggccgtaggcatactttggtttaaagaaaaattcaatctgtcacaattggtgtctctggggcttatcctcatcggtgtcatcggcttaaaactgacagcgtaacggcctgagacagctttttaaataaaaaacaaaggaccctaaacgggtcctttgtttttttatgctgttttgatctgttccgcttttcccgctccgactccgaaaatgaaaatcagaacagagactgcgatcagcatgaataacggaaccgtccagccgtgcgtgatgtcatgcagcaaaccgaatacaagcggcccgaacgcggcaagcaggtatccgaatgactgggccatgccggaaagcgccgcggcttcatgaacatgccgggtccgcaggctgaagaacatcatcgccagactgaacgcacagcctcccgcaattccgatcaaaatgacccatagcggagtgagagccgggcttccgaaaagaacgccggcaatgccgataaggaaaaataaagccgtcagtccggcgagtgcgcgctgatttttcattttagcggcagcgatcggcacgataaaagtaatcggcaggactgagaattgcattaatgaaagcatccatcccgccttacttgagctgagtccattctgctgaagaatttccggcagccaagcgatgacggtgtaaaaaataagggattgcagccccatgaacatcgttaccttccaagccagcggagaccgcatcagactgttttttttctctccgtttgtcccagtcgtgcggacgggcagttcgcgtcctcgcatttgcggaatccacatgacgaacgcaataaaagaaaggatagcccagcagccgagcgcgcctttccagcctacccccgctgaagaggcgatcggcacgctgatgccggatgcaatcgcgccgcacagattcatagaaaccgagtagacgccggtcatgatgcctaaatttccgggaaacttatgtttaatgagactcggcagcaggacgttgcatacggcgatcgacaatcccaacaggatcgttccgaaaaagagagtgccgattccggcgatggagcgcagcagagttccggctgtcaggacaattaatgatgacagtaagacaatctcggtcccgaagcgccgggacaataaaggaacaaacggcgacagacatgcaaaggccaaaagcggcactgtcgtaatggtgccggcagccgcattggtcatgccgaggctgtcccgaattgaggaaacgagcggtccgaccgatgtcagaggcgctctgaggttggcccctatcaatatgactccgatgaccagcaatatcagttttttacgctgacttgcttgcagaacttgatgttcgtctttaattttcatgttcatcctccatgtgtattgtatctttaaatactgtgatgtattggttgacggcctccatggcctgatccggtttctgtccgataatcgcggcggcaagctgggtgtggatccggatagcaggggtgatttccaacaggttatggactgacgcacaaagcgcctccgtcatatgctcgtatagatcagaaagcatattgttatgggccgcctgtacaattgttttgtgcagcttaatgtcggcttcggcataccgttttcgatcttcattttgcaaggccgcttcacattcatccaagcatgccttcagtgctttcaggtcttcgtcattacgcctttccgccgccaatcgtgcagcttctctttcgagtgcgtatctgacttctaatgtttcaagcaaatttgattttttaatatggcggtaaaatgccgcgccgagaacactggatgagctgacatacgtaccgctcccctgccttgtctgcagcaggccggcatgtacgagcgcccgaatggcctcacgcaacgtgtttcggctcacatcaaattgcttcattaaatccagctcagggggaatgcgcgtcccgaccggccatttatccgattgaattaacgattcaatttgcgccaccacttgttctacgagcgacagtctgcttgttttggatatctccatcaaaacacctctgaaatttgtaggatgattctatcattgggtaatataacataaaagaagcgacgatgtaaatcagcggcaacaaaaaaagagtgagtttttctctcactcttcggcgcttttatgaacgttttatattgactgaggtcacgacaaacttgtcatgacggtggcgggaaaatgaatattcaaagggagtgccgttgtccaaaaagcctacatgctcgacttcaagtatcgggtcatccggccggcagccgagatattgctgatccatatcatccgacttgcacgctctgatttttctgtgtgtgcccgcgattttgagctgcaatccccgcgtaatatgatcgtagatggaatggttgagcacctcgtcattaatgccgggtataaggctcgccggcatgtacgttttttcaagaacgtacggttcgccttcaacgattctgagcctcactacataatagacgggagtcttttcatcgatagccaaatgtgcggcgacatcttgagacggaaactgcacttcaaaccggatgaccttgctcttgatatttttgccttttaacaaattgctcaagccgagaatttcgttgctgactacgtgaacgtgctcatcctgcatggctgattgaatgataaatgtgccgtgccctctttttctgaaaagcatcccttcagccgcaagtgtatcaagcgcccgcttcatcgtcatccggctgcacccgaactccgcagcgagcgtcttttcatccgggatcggctgatctatgtcatatacactgcttttaatcctctttctcatttcgttggcgattttttcgtacttattcatcggtttcctccggctgtgtaatgtttgatctgtatagactccttacggttatcataaatttttttccctgcttcatcaatgacgttacagccgccgatattgaaattgaaaggatttcctcgaattttctatggaatctccctcactattatggtagaattttttgcagaaacggacacaaccgaatattgcaatatattgtataacctcaatgatatggtttgagggtgtctaccaggaaccgtaaaatcctgattacaaaaattgtcccgtacactttttgtaatcaggattttttattttctaaaaaataaaaaaaggagtatctgtacatgaatttcaaagtatttctgcttgcagcatctaccatcgcagtcggattggttgaattaattgtgggcggtattcttccgcaaatcgcttccgacttagatatatccattgtcagcgcggggcagctgatcagcgtgtttgcgctcggttacgcggtatccggcccgctgcttttggcagtgacggcaaaggctgaacgaaagcggctttatttaatcgcactgtttattttcttcctaagtaatctggtcgcttatttcagtcccaatttcgccgttcttatggtgtcacgggtgctcgcttccatgagcacagggctgattgtcgtcctttctttaacgattgctcctaaaatcgtggcgcctgaatacagagcgcgggcgatcggcatcattttcatggggttcagctccgcaatcgctttaggcgtgcctgtcggcattatcatcagcaatgccttcggatggcgtgttctgttcttgggaatcggcgtattatctctcatttccatgctgattatcagcgtctttttcgaaaaaatacctgctgaaaaaatgattccgtttcgtgagcagatcaagacgatcgggaccgccaaaattgccagcgcacaccttgtcaccttgtttacattggcggggcattacacactctatgcctactttgcgccttttttggaaagaacgcttcatttgagttccgtttgggtcagtgtatgctactttttgttcggtctgtcagcggtatgcggcggcccgttcggaggctggctgtatgaccgtttaggagcatttaaaagcatcatgcttgtgaccgtttctttcgctctgatcctgtttattcttccgctgacaacggtttctttaatcattttcctgcctgcgatggtgatctggggattgctcagctggagccttgcgccggcgcagcaaagctatttaatcaaaattgcgcctgagtcttccgatattcagcaaagcttcaacacgtccgctttgcagatcggcatcgcgctcgggtcagccatcggcggcggcgtgatcggacaaaccggttctgtcacagcaacagcctggtgcggcggtttgattgtcattatcgctgtcgcgttagctgtattctctttaacgagacctgccttgaaaagaaaatccgcataaatgtgagaccgcaaaaaagccaaaggagttccttcggctttggcggtctttttattttgcggcagcaagctcgtcttctgtcacccatttatgattggttactttttggccgccgtcagtcggtgtatagtcgaccatataaacggttgtctttttggctgaatcaataacggcttcggcacccttcatgcctttcatatgggatgcctcgatcacggccttgtcacccggttttaacgttttatcaccggcgcccttcagctcttcctgaatgacccatttgtgatcttcgacgcgctttcctcccgtttccggagtgtaagatacactgtaaaccgttgtatcataagcaccttttacggttccttgcgcatttttcatgcctttcatatgagaagctaaaatcatgacgtcactgccgactttataagtcggattttcggctttctttaaacctttcggcacctcggatgaacctgagtgattcatgtcttcgtgagagtgcgtttctttgtctttcgctttttcgcttcctcctgaagattgaccgttgcatccggcaagcgccagaacggggatcaggagaaacatgctgaataaaaatagtctcgctttcatttcaagaactcctttgcctttttgatttttcattttccctttcgtttcttcggtaaaacaaaaagatggcctgtcatttctcctaattcttcaactctctctttattgccttttatcaggtgaaattgttcacaaaatgtacacattaatagagatgcagtataatttaattatcagataatagggggaactcatcatgaaaacgaaggtttttgcggtggtattgggcgctgttttaatgattgcggggttggttttggcagaagtttcgctttatatggaatacatcacaatggtcggagctatgattttttcttctatatttatgtcagagccgaaaagaaaatttcgcgtcattaaaggggtttgacttttctattaccgccgtcttctcaggacggcggttttgttttgcatgtcagtcagtctatccgcaaagccgtttcttctgtgccgtcctgatataaaacgaaatgcggggcagtttgtgctttatcacctgcaaattcaatttcaagcggcagcgccctgacaaaataacgggtttccgtcattgggaataattcaaatggtgtctgcccgtctattgcaagatacaatcggttttcttttaccgtcaccgatgcatgtgtgtcatcctgaaatgagtaattgccggtaaatctgctgtaaatcgcaggatcgatatctgcttttttctgatccgccggacgtttcggaatcacgtacggctgatcaaataagatgtttacggccgcggcaatcacagcttgttcaaattgatacgattgttccatattgctgagataaatcagtgttttgttctggtcaatataccggatcatcagagttgaataacccggccagcctccgtcgtgactgataaccttccctttttgggcgctgttttgaatcatccagccaaatccgtatccgaattgctcttcttcattccaatagcccggtgtaaacgcttgatctttagactctttgccgatgatttcttccttataaagagcctgatcaaacagatataaatctctaatagtggagttaacggttccgtcaccttgaatcccgtcaagaaagacgacataatcggtttcctcaagttcatccggcagcacatattctccggaatgaacatcatacacatagccatatgcatagtttggaatgttttctttactcagccttctgttataaatccgcgtatcgtgcatacgaagcggatgaaatacggcttgtttcataaattcagcaaaactcatgcctgatacaatttctataataaccgctaacaccgcataccccgtattactgtatagccactccttgcccggcgggaaataagcatccggtttatgctgcttaagcatatcgatcacatcttgattaacggcaattctgtcccggtcccaatgtgttaaaaataactccatatagtccggcaatcctgacgtatgatggagtaaatgccgaatggtaatgcccggataaggaaaatcaggaagccaccgctctatcatatcgtcataacgcagcttccctcgctgctctaaaatgataacgcctaaagctgtaaacggcttcgatactgaggccaattcaaagactgattggtcattcagcatcctctttgttttcagttctgcagcgccgaatgaaccctgatataagatgcggccgttttccgctgccaatacagctccgtttatttcatgtctttcgtctaaagtgctgaaaagctgttcaaaagcttgttttttcttatcgttcatttcacgaacctccatatacaagctgatttactcttttatacgaacagccgctttagaagtttcaatattttcccttcccggaacaccagtcagtaaactgccgttcaggcagccgcggaggtttaatgaaggtcttttattcgcacaacactgtgcaggcttcgaactcaacatgcttctcgtctttttttgcgccggcaatttccatagtcgaaaacatcgcacagatgacggctttgtattcgttcatgacggtttgaatttcaatcagaaaccgttcggatgaagaggcgtattccgttacgtattctttcattttgccgataatatcatctgcctgacggatgaagccggccgcctccaagtcactctcaaactggtttttgttgatcatatgaatatgcatttttcaaggcccctttcagcagcgttttatggttatatccactgtaaaggacaggcttggataaacttttaataaaatatgaacaaaatatgaattggctcatcggcctgaccggcgggctttcggctgtgctccgtttcatttggactacctgaaataatgacttctttactctatgaaaaacagctcatatatgatctaataccagtaaaatgaacgttaggaggcggcctatgtcagcagcaggaaatcggcaaaaattttgggtcatggcgatgcttatagcggtctttgccgtgtttgttttctctttttccgagaatcattcacaaaagaactggcacacggcggttgaccaggcgtcagtgaatgtcttcggccagcagatctttgaaaaagaccgtctggcaaaaacactcaacgcacgtgaggcagaatctcttctgactcttgtgaaacttgcaaatgaagaacatcacatcatctaaaagccattataaaaagcctgtttccctttggcagaggaaacaggctttttccatgtattattgagcatgtttttgttcaataaaccggtcgatccgggccagaacatcctgcatgtccatacattctttaaagctttcattaatggcttgaatgccttgtttgtattttccgttatgcagcacttcttccgcggcaagctttaccttttcagcgctcacttcatctttttgcactgtacagcctgcatccaattcagtcaggcggcgcgcaaccatcggctggtctttatcatgcggaataacgaccagcggcacttgataatgaatgccttcatttacactgttcattccgccatgcgtgacaaacacgtcggcctgctccagcacttcaagctgcggcacgtacggggcgatgataaagttttccggcgcctgtttgattttcgacagatcggctttttccccggcggcaatgactacttttccttcaaaatctgagaacgcgtctatgcacagattgaaaaacgcttccgtgtccccgagcaccgttcccattgagatataaatgactttttcattctttaatgagtcaatcgggaagtcgacgcgcccttttctcttcggaaaactcggaccgataaataaatactcatctccgaatgtctcactttcgggctgaaaatatctgcttgtatagacgacgttcaattcacctgtgttgttcataaattgaaccatgctgtcaggggcgacaccgtatttgtctttcatctcggccaacagctcttcacattccctgtccggctgaaacggcacgcccgattccggatggagcggcagtattttcagacggtcttcattgaacaggaaggatgctgaagaagagatgccgggaatgttgagataatcccgcaccaactctcccgcaccaaatttatcataatagacggcgtcgaattgaatgtcctctgccagccgctgcacaatatgtaaaatctccagtgacgttttgatatgaacctttaaaaatgcaagtatgccggacggactgccgggatcaatgggtgtcattctgagcagatcgctgtgaagatgaactttcgctcctactccttccagtctgcttttgtatttttccgttgagatataatgaacgtgatcgccccgttcgctgaaggcctttgtcatacccaaagtcgggtttacgtgtccttctgcgggaaaattgatcatcagaatatgtttcgccatttttcaaactcctttgccttttttgcgtctcttccatatccatcataaatgacgcggaaaaaatcatgcaaggaacattcgtcaggtctttatgacggttcgatgacatcggcaaaaaaagacaaggcttttcaccttgtctatcgtgatgattcgtctgtttcacccgctttgagcacacctttcagatgttcttcatcatgcttgagatgctccgtcatatattgcacggcttttgttttatcgcccttttttatttcttcaaagactttccggtgctcatgcaggataacctccgcacggtcatctcctttaaaattaagaactctgcaaaaatgaatcagcacattgacatgctcaagcagcatggccagccggctgttgcggctgaaatccacaaggagccgatgaaacgactcgtttaaggaaataatctcagtctctttgacgcctttattgatggcttcttccgtctcccgcagctgtttttcaatgaggtcaatttcactctcagccgcttcatcaataaccagttcgaccgccaatgattcaagtgacattctgatttgataaatctcttcaacatccttaacggacaaagaataaatgacaaagccgtttcgatcgtctgccgtcagaagcccgtccttttcaaggagccgcatggcttctctgaccggcgaccggctgactccgaaatccttcgccagctgagtctcattcagccgttcacccggtttaaaaatcccgtcaaatatcatttttttcaattgggaataaaactgcagataatacgggattggcttatctaatttaaaattatccatctttcctacctcttcatacaatttaggccttattgttaccaagatcatataacagtttatctatggaagcaacattccagagcttgtcagcataacggaggtgccgtaatatggaagtatagttggtcgagggtattccgtaaaccgaaaacaattcattcggaggtgacggaaacatgaagacatactagattgccggcataccgggggacggtgtggggaaagaagtcgttccgcaagcggagcgggtgttgaacgcgatcgccgaattacatggaggcattgcctttgatttcacttcttttccgcggagctgcgagtattatttggagcacgggactatgatgccggatgatggattagaaacgttacagcactttgatgctttgtttttgggagcggtggggaatcaaaaactcgtccccgatcatgtttcgctgtgggggctgcccatcaagatacgccggtaactacatctccgattttgatctgtaaacgtccgggaaggtgagtacagctctgtcggcagcagcatctatcagggtgaagatgaaatcgccattcaatacgcggtcctttcccggcggggtacggaatgagtgatctgttttcgaaccggcagcgttcggctggggttttgacaaagaaatgatacaattttttacagagatagagagagaaaattgtatgtcaaatcgcagcaggggaactgcaaggaaacggtaacccctcctttaattgtggtgaaaaaagaggatacacctacaagacaggtcgattaagatggtctattggcatcttacatccgcaaatatgtctttacacaaaaaagttagagaggtaaaaaatatgaaaaaaatattttacttttttttgatattatatataattatagtattattacttaattctgtatttgacttaagtaatgtattattaactgttttgtttgctatattcgttggtgcattagtgatttatagcattgcgaaacggagtaaaggtgatgagagaaaaaagtgttaaagaaggttactaaattatttatagcggggtgtattctcgctactgtgttgtctgctttcgctccaagttctgaagcagcttgtcgacggacaaatcttgggactcagtgtgataatgatgttcttcttaaaaaaagggtaaaggtttattacacaaaaaatcaggtgaaaaaagtggtttctagatataacagcatggggtctaataaagggcttattctcggttatattattgggttggtacacccttctactggtttaagtgttttaatgtatcaagtaggagctaataatatgattaagccttttaaaactgctaattctaagaaaaagggtttagagatttcttacacggttaccgtttataagtggtcaaatgcatctactaaggtatctggagtaaaatataaatatagataagactaagtaatacataatgagcaggcgatggcctgcttttttttattacaggagaaatgtgcaaaatgaaaaaggaaaactgaagtggaaatcgatctgcatgtcagggagcctgtgtgatgatgcgttcccagagtgagtcaacagtatgcggattgcagggaggattaaggagttgactcactcagtcagcattcaaacaaacttgtttcaatcggcggaaacacgtcacaagcgcgacgaaatcaaacggtattgttcactcgatgccgttctgggatgacatctttaaagaggtcagccgggagtacgccgggatcgagacggattcccagcacatcgatgcactggcggccttctttgtcacgcagcccgaacgctttgatgtcattgtcgcttcgaatctgttcggagatgtgctgacagatatcggcgcggcgattatgggaagcgtcggaatcgctcccgcagccaacatcaatgtaaacggcaaatatccttccatgtttgagcctgttcacggctccgccccggatattgtcggaaaaggaatagccaatcctatcggccaaatatggacggcgaaattaatgctcgattcattcggagaagaggaactgggccatctcctcttacaatctattgaaacggtcacaaacagcggtattctgactcctgatgccggcggaaaacattcaacggaagatgtcacttccgctattatttctcaaatcaagaacagataatacgaaaaaaccgcgggcaggaaaactgcacagcggttttttcgtctcagacgggacggagcgcgcagaaacaggccgattcacctgtgaagcccgcaatacggcctgattgatccttttctacagaaaaaaaccgctgtatatcacaaggagcatccagcatctgtttttccagtaatgcggctttctcttcagtcaggcttgcccgttcacaccagacggtaaattgaaatggtttcaaaaagcagacagcggattcaatccggaagccggctgtctccagaaaacgaagccattctgtttttttccacgcccgaaagtggctctgatcccgtttcttttcaatgtcattataaaaatggtcatattcatccttttcaggtgcggtattgtcaatgagaagcagtctgccgcccggtttgacaacccgaaacgcttcatgaacaaaggctctgacatcgggaaaatgatgcgccgcgattctgcatgtgacgatatcgaaagcagcatcggaaaacggcatcttttcagcatcgcctttttcgaatgacacgttcgtccatccgtttccggttataaatgcttcagcggctgctaacatttcttccgtgaggtcatatgcgataacagagcgtacgagaggagcgagagcgttagccgtatgtccgcctcccgtcgcgatatccagcacgtccatatgcttttcggcaccggaagctgaaatgagatatgccaaatcctctcctgcggcgtatccgggactagtcacatatttcgcggcgtttttagcaaattgccgctgcgcctgctgtttaattgaatcctccattatacttgggcccccttttctttctgcttgctgccttaatcaaaataaacgggttcgtccggatgtttgagatatgcaaacatcttttcaatctgactttccgtattgcgggcttcagatagcggcggcagttccgtttccgcaaaaaagccggccgcgcttgtttccgttccctccctgagccggccgccgatgatctcgcatcggataaacactttgtaaacgtgggcggcggacggcgggtgggaatggcatttcttatccattacagctaacagtttaacgggctttacgtcgattcccgactcctcttttacttctttgacagcggtctcgcccggtgaaatcccgatatcagcccatccgcccggcagcgcccatctgccgtcgcttttctctcttaccattaatatgctctgatctttaaaaactgccgctctgatatcaactttcggagtgggatagcccgtgtcaccggcgaatacgtctttgatgatgcttttgtcgatgccggtatgttgcgccatgatatccacgcttatttttcttatttcttcaaatctctcaatatcatatatgtctttggaataagccagccccgcttgcgccgcggattgaagctgttttgcccattcaagccattttggctccattttttccaccgcccgttatgttaattaaacgaaacccgaattgcaccttgagagtaccccgtttctgctccttgttttctgtttatggcggagcgaatcctgccgggaaatcagaaaaagccattcatttgctgaatggctttttttcattttctatttttctttcatgacgagaacgacgcctgaaacaataagggccgccccgatccagaaggttcctccgatcgtctctcccagcagcagccagccgagcaatgtcccggaaagcggctgaaagaagaaaaacagaccgccgcttgccgcattcagcaattgtaatccgcgattccaaagcatgaacgcgcaggcggttgagatcacacccagatataaaagtccgccccatatctcaggccgggcaagctgagacaaaggaatctcccgaagcgggccctctgtaaacggggtcaggatgacaaatgcgacgcaaatggaatacgttgtgacgacaagcggtgagtaatggccgggaacccgtttcatcagcacggacatcaaagcccatgtcagcgccccagccagaagcgagagaccgccgaactggctcgacatattgagatctccgttccccacaatgagcaatactccgatcgtcgccagccctgtcgatattccttttttcagcgttaaccgttctttcaaaatcagccgggcaaatacaaccataaatgcgggagtggatgccgtaataatcgcacccatctgcgcggttgataatttcgtgccgatttcctgcgtgacgatcgaaatcgtgttgccgatcaatccgatcgcagcgatcagtaataaatcacgtttatgaactttccaggattggcgtgtaaataaactgagaatcaaaagcgaaaaaagcgccaccgcatatctcagccataccagttcaagcggcggaatgaccgctaccactactttaacgacgacatacataccgccccagatactggcggccaatgccaaataaatcgaaccgaacaatgtatttttcaatttgatgcaccctccgttatcatattaggtcacgtcatatgccttaacggagagaagcgcagtcactttcctccattaagggcggagaagtgctgccggtacatcatgttcaaataagggcgctagaaacatatcgtttttcacctcaattgcaatctgatttttctcattatacaaggtttgtcagaagacgtaaacgaacggcggcatcggctttatcgattgcggacttgcagctggattcttgtgatctgattgtcaaacccgtccgccacaacctcatcaagcaaatattcttcatatgcataatcgcccatttccagcccatactcttcaataaactgcatgatgctgcggtaagccgcttccgcttcatcccctatttggtacccgacggcataaagccctttcggcttgatatggaggtcattattctctatgccttcttctgtcttcatataaaaatgggtgtagttgtagaattcttttttcagaatctgctcccgcgcaaacagtccgccgaccggatgcccctgatcgagttcatgtacccgcatatagcggatcaattcggaaatggccgcagtgtattgccgttctggcaaatggagtacgggtcgtcctatcataagtgtctcttcatctaatcgctgcaatgagacggaggagaagtctgtctccaaagcttgttcggtcagcttcacctttgtctgaatcattctttgcaggtgctccagctttttgattttgctttcgatttctgatgatttctcttttaaaagcgtgatgataccctcaggggttttgtctgttaagagcggtttgatctgcttcaagggcacgccgacctccttaaacagaccgataacctggaacagttcgaattgatgataggaatagtatctgtatccgttcgcttttttgatttccggagaaagcaggccgatttcgtcataatggaacagggtttgtttttttacgtggcacagttttgcaaattcacccgttgtgaagtattttctgacgtcttcgctcataatgcctccttgactatacggtaaccatatcctttatgatgatcattgtatccgagagaaggctgattcacaaatggcttacgcaatgaaagctttaccgtctcagaaaaagcagaagaggagtatcaagtatgacgattgaaatcagagcagtcacggaagaaaaccgtgctgatatactggcgcttcatgtaagggaaagccagacttcatttattgaaaccgcggaagagtgcttacaagatgctgaggattgccggcattatcagccggccggtctttatgttaacggggaattagtcggctttgccatgtacggatggtttccggaatatgatgaggaaaatgaaaacggcagagtgtggcttgaccgtttttttattgatgaacgttatcagggacgtggattgggcaggctgttgcttgatgcccttatccgccatctcgttcgaatatatgagtgcagacggatttatttaagtctgtttgaagataacgtgcacgcattgcggctttatcaaaaattcggcttcttattcaatggagagctggactcaaacggggaaaaagtgatggtgaaagagctgtaaaccctctgtataaaagcgattcggcttcttgccaatccctcaaatttgaggtaacataaagataatggacgacggtcgacggacgacgatcgattgttaaaaacctgataaagcggatctgaacatggtgatcaggcatctaaatggaggagaagattgtgcttattatactcgttatgttccttctcgggattattctagggtttatcggcgcggggggagccggttttgtcattgcacttttaactatactgtttcacgtaccgattcatacggctttgggcacctccctcgccggaatggctttcacaagtttatcgggggctttcagccactaccgtgaaggcaatattcagatgaaaatcggcctcatcgtcggcgtttttgcggcattcggttcgtttttcggggcaaggcttacttcccttatccctgcagatttgctgcattacttgacggcgggcatgctgtttttatccgctctgcttattttagtccggttatttattgtaaaagaaacacatgaagattccggacggcaaagcaatctgaacatatgggtgaaagccgttgtactcggtatcatcgcaggaatcttgtccggaacgttcgggatcggctctgcccctttcatccagatcggcttaatgattcttttgcgcttatccatccgccagtcggtcggcaccaccatgcttgtcattatcccgcttgcggtcggcggaggactcggttatgtgacggaaggatttgtcgattatatactgttggtcaaagtgctgatcggcacgatgtgcggcgcatatgtcggagcgaaattcaccaaccacgtgccgaaagtcattctgaaatcagccatctttttaacaccggccatcgccggtctcatgcttttattttaaactgaaacgggaggcggccgcctcccgttttttctgttcttcacctgttttcgaagagctttttcagctttgcttccgtttcggtatgatctaccggcgtatacacactgcagcgcagatcactgttgccctgaacctgaaatgaagtcaggttaaagaccatttttcccgccttcgcgtggcggaactcaattaatacttcgggtgccgagctgacttcgctctcattccacagcgtatgaaattccgaatacgttttctccatttcttctataaactgagaataccacgtatcagctacatactggccgtagtacgttctgaaaatggcgatgaatcctttcacaaagtgctcccagttcacagctaaacttcttaattcttttctggaaaacaatagctctatgagattccgtttttcaggaggaatttgttcaaaatctaaaaacacgtgagccgcggcctgattccatcccacgatatgacagcgcctgtccgagataatggtgggacaataacggagctcctgcaggatttttgaaagcgacgggctgataaccgcttcttcctccgcggcaaacggctgcttcacgccctcctcaatggcaagcgcgtataaataatttctctcatctttgttgagctgcagcgcatcggaaaccgcgtccaatacggctgcggacactttaatgtctctgccctgctccagccacgtataccacgtggtgcttacgcctgctaattgcgcgacctcttctcttcggagcccgggcgttcttctccgtgtgcccatcggcagcccggccatctgcggagaaattttggcccgctgcgtttttaaaaactctgagagcgcctgcaatcttccttctggtatcataccgaatctctcctctcttaccctggtattcattatactaggataatcaacaacttgtaataggataattgcgagttacaataaatacataccgaaggaggaatgaccatgaaaagagttgtgatcaccggaatgggagtgatttcacctctcggcaatgatgtgcatacattttggaaacacctgacggaaggaacatcgggaatttctctcatcgattcgtttgatgtctccggctccaagacaaaaatagccggcaccgtccgtgattttgacgcagaagaaagatggggcagaaaagaagcgagacggcttgaccgtttcagccagtttgctttagcggcagcggaacaggcgcttgaaagctccgggattcagctcgatcagattgaccgtgaacgcctcggcgtgtacgtcggctcgggaatcggcggcatcacgactttgattgataacgttcatactttaaatgaacggggagcgcgaaaagtgagcccgagccttgtccccatgatgatctcaaacgcggccgccgctcaaatcagcatcagattaggcgcgctcggcccctcactttctcccgtcaccgcgtgttccatcggcaatacgtcgatcggggaagcattcaacgccattcggaatgatgacgcagatattatgtttgccgggggagcggaagcggcgattacgaatttgtcattagccagcttcggcaatgcccacgcgctgtcagcgagaaacgaagaccccgccgcggcaagccggccgtttgacgctgatcgcgatgggtttgtcatgagtgaaggcgcgggcatcttagtattggaatcattggatagcgcaatcggcagaaacgccccgatcctctgtgaggtgctcggctacggcgcaagctctgacgcgtatcatatggtggcctcccatccggaagggacgggcgcatacctggcgatgaaaaatgctttgaaaaaggcgaacgtttcagcggaagacattgatgtcgtaagcgcccacgcgacaagcacaaaagccggagatctttctgaaacattggcaatcaaaacattattcggggagcttgcgtatgacattccggttacggccaacaaatcaatgctcggccacatgcttggcgcggcaggcggcgttgaagccatcgctctgacagaaagcctgagacacggcatcatcccgccgacgatcaatctgcagcaccctgattcggcatgtgatttggactatgtgtcagacgggccccgccatcaatcgttaacgatcggcctttccaactcattcggctttggcggacataattcggcgatcgtgctgaagaaatatgaatagcgggcatcaaaaaaaggagtgaatcatttcactccttttttgctttctccggttttgttgttaaggcaaaaaaagcgatggaaccgataacggatgtcgtgaacataattgcccccatcggcacggccgtcgcttcattcatccccacaagcggcgacacgatggaaccgagaagaagcggaagcatgccgagcagtgcgcttgcgcttcccgcgcggtgtccctgcttttccatcgccaatgtaaaggtgcttgtcagcgtcatgccgatcgtaatcatataaataaaaatggaaatcaccagtgccgccagcggtccgtgaatgatcgtcatgacgagcagaacggcagtcgccgtcatcgctgtaatcacgccgattttcagcaggcttttttcgtgaatgatcccgccgaaacggccgatgataaagcttccggtaatgatcgccagaccgtttatgccgaataaaacactgaatacctgaggcgatactccgtaaatatcctgatacacgaaaggcgttccggagacatacgcaaagctcccgccgtgaataaaaccgaccgtcagcgcatagccgataaatgaccgatccttcagcaggcttcccattgtccgcacggaatttccgatggagctcggaatccgcttttccggcggcagggtttctgtcagcttgagcgcaatgatgagaacaagcaaaaacccgataaaggttaaaaacagaaaaatcgtatgccatgatgcaaacggaagcaataaaatcgcgcctcccgtcatcggcgccaccatcggcgcgacggcggtaatgaccatcagcagcgagaaaaatttagaaagttctcttcccgtaaacacatctctgacgattgcacgggataaaacgagtcccgccgaagcggtgaatccttgaagaaaacgggcaatcaccagtgttgaaatgttcggtgcaagcgcgcaaaacagagaaaacaaagcaaataaaaaaatacatagcaataacggttttcttcttcccttcgcgtcacttaacgggccgacaacaacctgtccgattgtcagtccgatcagacaagcggttaaactgagctggacaagcgaagcgcgggcgcttaaatcttcggcgatttcagggaaactcggcagatacatatctatattgagcggccccagtatcgcaagcattccgagaagaaaagccagcgcaagccgctccttaccggtcggattatgcagcatatcgttcccacctttcctttgtcaatctctcaaaacatttgtatattgtatcataattttttctttatttttaaaagttttcaaagggcataaaaaaaaccaagggctgtaacagcccttggttccgggtcacgcggtaaaaggttttacgcgtgtttttctttaaatgcttttgcgtattgatcagccgctataatggcgtccgccacgtcgtcagccgtcacgtcaaaagcggcatgaatcgtttcttcttcaatcgtcgcggcttctgccactttcataatgtcctctttagatgcgtctttcattttgatgtcttcaagtgtgacaggcagccccaagctgatataaaacgcgatataccgctcaatttcctcaagcgaacgtttttccagcgccaattgaacgagcgtgccgaatgccactttttcaccatgggtcaagtgatggatttcaccttcaagcgcggtaaatccgttatgaatggcatgtgccgcagctaagccgccgctttcaaatcccagtccgctcagaagtgtattggcttcaaccaccgcttccaatgcgggcgtaacggctttcgctttcacagactcataagcgagacggccgtatttgaataataccgcttcacatttttccgcgatagcctctccggcgattgtcggaattccgcctgccatcgttttaccgccattggcgatgacactgcgcgcctctatccacgtcgccatcgcatcggcaatccctgatgctaaaaagcgcggcggagcttccgcgacgattttcgtatcgaccagaaccaagtcaggattcttatgataaaaacgatagttttcgaacgcgccttgttcagaatacacgacagacagcccgcttgtcggagcatccgttgaagcggccgtcggcacgataacggtgtagccgtttatttcatctgatacggctttggccgtatcaagcgttttaccgccgccgactccgatgacaatagtcgcccctgctttttctgcgatgccggcaattcttttcatttcttcctgggaggcttcgccgttgaaaaccgcctcttcagaagagatattgcttttctttaattcagccgtcaccttgtggcccgcgatatcccatacggttttgtccgcgatgacgacggctttttcaccaacgccctccagatgtccgccgatcgtttcaatggcgttttttccctgcacgtatttggccggactgataaaaattcgttccaatgtcatcatcccttcttcgttgtctctcattacatttctcttattgatagagcggaaatgaaaactcttctgatataattcctcgttttaacttggtttaaacctcatatacactgcagaaaatcaattttcacggcattgacaagatgtgaaggtgtctatataatcttcgatattgaagctgatcattctttactgaatgaacaaacgagattgtgaatgattcgtcttaaaaattatttagttctgctggataatttttgaggcgtttttgttttatatatatttttgactgcggaggaggtttgcacatgaagaacatttgcaaggatatactgatgattatggccggagcctttcttatcgcggcgtccgtggaatttttcgtcatcccgaatcatttaggggacggcagcaccgtgggaatcgctctcgttttatattatcttttccatatacctgcaagtattacgactctggttgtaaatttgatttttatcgggctggcttataaatttttaacgaaaaaaacgattttatacacgatactcggtacgggaatgacttctgtttttctcagcatcgtcagctttattccgttcggcgtgcacgacatggtgctcgggattgtattcggcgctctgctgatgggagcggggctggcattgatctttatcgctgacggatctaccggcgggaccacgcttttggcgtatttattgaattacacaaagggctttaacatctccaaaagcatgttttatatggattgtgtcatcattttcgcatccgttttagcgatcggaatcaatcatatgctgtatacgtttatattcgtttatctgtgcgccaaaatcgtcgatattgtcattgagggtttccataataaaaaagccctcaccattatgtctgaccaatacgaagaaatcgccaaagccatcacctccgagtacggcaacgcggcgacgattttttacggatacgggtattacggcagcaaagacaagcgcattatctatgttgtcattaaaaagaacgaattgctgaaaatcaaaaaacatgttcaaaaaattgatccgaaatcatttatcgttattcatgaagtaaaagaagctgtcggagggcaattcgggtttacaaacctgcccgccgccgcaaatgaaaaataaccgcctgcagtgtatagctgcaggctttttttattcggctcttccccgctcaaaggttttttacatctttcaatcgaagtagtaaatgaaaccttttttgatggaggaacataaaaaaatgaatatcaaaactgaaaggctcgtcattcggacatttgaaccggaagattggcaggatgtctatgcgtacacctcgaatccgagtgtcatgaaatatataccagagggtgtctttaccgaagaagatgccaggaaattcgttactgaaaacagcggtgaacatgccgggaagtttcccgttttattgaaggatgagaaaacggtcattggccacattgttttttttcagtattttggcgatcatacgtatgaaatcggctgggtgtttcacccggaataccagggcaaaggatatgcttcagaggcggcgcgcgccgtgctggcattcgggtttaacaagatgaaattacaccggatcattgcgacatgtcagccggaaaacatggcttcgcaccgggtgatggaaaagatcgggatgaggcgggaaggcttgtttaaaaaatgcatcccccatgataatgaatggtgggatgaatattattatgccgttttagaagaagagtgggaagcctccgatctggaataaaaaggcttataccctttgcttttacagataagtgtgtgctacactgttcgtaacaaatacgaagggatgatgggtggacaatgattaactaatcttattttgaccgtttgaaatcaaatatttcaaatcagaaaaaataggattagtctgcccattttctatacgatacgagaaagctatgtaaaaatagcttatttgatcacgcacaggtacggctaatccttccaaatcaattgggaggatttttttgtcctccctttaaagcgagggattgacatatgaaagaaatgttaaaaataagcggcatcagttacgaaatcaacagcgttcccctttttgaacagatcagcgcgagtgttcagcaaggcgacatcatcggtgttatcggtaaaaacggcgccggcaaatctttattgctgcaattgatctgcaataaaaaagcgccgtcacaaggacagatccagatgatgcaagatgtgaacatatatatggtggaacaagaaacggaagcttatgattccggccatccggagcctgcggaggcagccttgttagaaaagtggaacgtgcccgcacgcgccttttcgcaattaagcggcggagaaaaattgaaagcccgtcttgccaaaggtttctcctcctcaagcggccttttgttattagatgagccgacgaaccacctcgatcagcacagtttagaaatactgcttaatcagatcaagaattacaaaggcaccattattttcgtttcacatgatcgtgcttttatagatgcggcggcgacaaaaatctgggccatcgaaggaaagaaactcattgaacataaagggaattattcaagctatatggaggtccgcaaacagagaaggctgacacagcagcgggaatatgagaatcagcagcatatgatcagacggattgaagctcaaatgaacgagctgagcgcctggtcaaaaaaagcccacgcccaatcaacgaaaatagaaggctttaaagaatatcaccgcgtaaaagcaaaacgcacggacgcccagattaaatcaaagcagaagcgtcttgaaaaagagcttgaaaaagcgaaagcagaaccggttgaagcggagtatgaagtccgtttttccattgagcaccgcaaaaaagcgggaaagcgttttttagaagtaagtgatgtcacaaagtcatatgaaggccgaacgctttttaaaaacgtgaatttcactgtgatgcacggtgaaaagatcgcgattacaggcccgaacggcagcgggaaaacaacattattgaaggtcatcctcggtcaggaaaaagcgcagggcggcatatggatttctccgtctgcaaacgtcggctatttaacccaggaagtattcgaccttccgcttgataaaacccccgaacagcttttttacaaagaaacgttcgaagcaaggggaaatgttcaatccctcatgaagcatttaggatttaccgcagcgcaatggacggaacccatcggcaagatgagcatgggagagcgggtcaaatgcaagctgatggcgtttattctgggggagaaagatgtgctgattctggatgagccgacaaaccaccttgatctgccgtcacgcgagcagcttgaagacactttggcccgatacgacggaacgctcatcatcgtatcgcatgatcgttactttgtcgaaaagacgacggacatccggcttgatatctcaaacggcagcgtccgaaaacaatggaaagaatctccctccgtcagggatgatgctgaagaactgcgattaaagtttgaaaccgaacggcaggaagtcctcggaaaactcagcttcatgactccggctgataaacaatatcgtgagcttgatcaaaagttcaaagagctgacggaagaaatcaagaagttgaaatgaatgtaaaaacccgtgattgtcacgggttttgttttggaaagttcacgtattatgaagaataatttcaaactgatttgtacaacctacgttcagattcatacgagaaggttcagaaagaaaggttcaggtgaacgcagaatggccaaacgcatcggaattacgggaaacattatggctgatcaatccggccctttcccgggttataatcgggcatatgtcaataatgattatattcagtctgtttctgaggccggcggtgtgccgtttatattgccggtgattcaagagacggcgcttttaaaggaacaggtctctcatgttgacggcatcattctgtccggcggccaggatatagacccgctgttttacggcgaagaacctttacaggctttaagaaagacctttcctgatcgggacgcctacgaaaaggagctgattctcacggcggttgctttagaaaagccgatactggccatctgccgggggatgcatatgttaaacgttacttacgggggaactttatatcaagacctggcacacgcttcgtttgctgacattaagcatgaccaagaaaaagatccgccgttaaaaacccatcatgtttcttttgaaaaagggacacgtctccataccttgtttggcgattcagcgcgggtgaattcattccatcaccagatcataaaagagacggcgccttcatttaaagccgcggcttatgcgaaagacggggccattgaagcgattgaacgaacgggtgaattatttgtcgtcggcgtgcaatggcatcccgaaatgctgacaaaaaaacatgaagacatgaaaaagcttttttctctgttcatgaatgcggtcagcacataaaaaaagcagatcataacgatctgctttttcattttattcttccggtttctccggtgttttgccttgtgtcagcttatggccttcgatatccacgttcggaatgattttatccagccacttcggcaagtaccaggccgcatgtcccatcagcttcatgacactcggaatgatggtcattcttacaatgaacgcatcgaaaagaacaccgaaggtcattgccaaccccatggatttgatcgtagagtcccccgcgaagatgaatcccgcaaagacgaaaatcatgatcagtcccgccgctgttacgacaggtccgctatgtttcaatccggcatggatggcttgtaccggattttttgttttgacatattcttctctcattctgctgacaaggaatacttgatagtccatcgccagcccgaaaagaataccgatggctaaaataggcaggaaggcgagaatcggacctttttccggaatgctgagcaagccggtgaaattcccatcctgcagaacgaataccgataacccgagtgtagcggtcatcgtcagcaaaaagccgacgacggcggcaagcggcacgagaagcgagcggaaaacaacggtcagcaatacaaacgcaaacccgacaataagaatggcgaatttcggaatcgcatcgtttaaccggtctgaaatatcaatattcaccgctgttgacccggtgacgagcaggcggatgccgtttttgtctgatcgtttccgtatatcctgcactaactctttcgttgccttatcattcggcccggtttcaggcactgccgtaatgatggcataatcccctttttgattcggcatggcaggtgtgacgctcgccacattgtgcaagtcctttatttctttcacggcgtcttgaaatgcttcacttttattccccttgactccttttgcatcggcaacaattgtcagcttgccgttaaagccttcgccgaatcctttagacaacagatcataggcgcggcggtccgggctgtctttcgctttcattcccgcatcaggcagccccagttctaaatgcatggccggcagactgatgacagctaaaagaataatgctgaaaatgcttaacagaataggcttctttgtaacgaagcgtccccaggcattcgtgtcggcgctttccttttctttcttcttgtttgatttcggaatcatccgttttcctgcgattgacaacaccgcaggaaccagcgttactgatgccaatacagccatcagcacactgagtgccgcagtcaatcccatcgcagacatgaacggaatgccgacaacggtcaatccgcaaagcgcgacgatcacggtcagtcccgcaaaaacgacggcgctgccagccgttcccgcagctttagcgatcgattcatttttttgtacaccttcgcccaaaaactgacgatgcttcgtaaagataaacagcgcataatcaatcccgacggccaggccgatcattcctgataatgagagactgaccgaggctatcgtaaagatctgtgtcccaattaacgtcagcgcgacgcttacacctaacccgatcagggccgtgacaatcggcagccccgctatgactaatgaaccaaacgtaatggccagaacgacgaaagccagcacaacgccgacaatttcagatacaccgccggcttcaacaccggcccccggcacatcgccgctgagctccgtctgcaggcccttgtctccggcggcggacagactgtgtttaatatgtgaaacagacgcatccgtaatgtcatccgccgcttttttgtacgtaatatcggcatatgccactgacccgtctttagaaatggttcctgtttcaaaaggatttgcaatcgaagcgaccgaatgatctgttttgatcttctttaatgtctcttcaatcgcttgtttttccggttttgacgtcaatttcttcctgtcttcagctccgaaaataacccgtatgcttcctttatcgggcccctttgaaaattctttttgaatcacatccatcgccttttcagaaggtgtgtcgggaattgacatatcctcagaaaaagcaggttttaacgagatggcgatcacaatcgaagcgatcagtatcacgagccacgcactgatcattttgaatcggttgcgggcagaccatccccctaatttatataaaaaaccagacatcgaatactcctctccaatcattactttctgcctaattgtagttcacattcacataaaaaaaacgtacataggggcatgtacgtttgggcagtttttcattatatattcagtttcagaatgcctttttgcatagcaatggtgacggcttccgtccgcgaatcagcgcctaatttgttataaatcgatgttaatctcgcttttaccgtccgctctgagattcctaaatcgaaggcgatcgctttgcttttatgtcctttcgcaacggcttgcagaactatgatttccttgtccgtcagctgtgtttcattggcatttgcccgttccattttcttttcccggaaacgccgcaagatgtccggctgcagaagcacttctcccctgaccgccgcatccatcgtatgaaataaggtttctgagcttgtgtccttcagcagataaccgttcgcgcctgattcgatgccttctatcatcagatgatcttcattataggtcgtcaaaataataatcggcacatcagaatgctcttttatctgtttaatggcttccagcccgctcatttccggcatgtacagatccatgagaatgacatcgggctttagttccgctgcgaggcggacggcggttttcccgttttccgcctctcccgttatggtgtaatggtcatttgtttctatcaaaagcttcagaccttctctgacgacaagatggtcatctgctattaacactttatacatgttccgcttctccttgaattggtatgatgatctcaatttgagttcccgctgatctggcgcttgttatacggaaagtgccgttcatcatattgacgcgttcttgtatccccagcagcccgtaatgtccgctttttctcatttctgttccggcatcaaagcctttcccgtcatctttgacggttatgcggatctgtccctcttcttcctgaacggacacccagacattctttgcttctgcatgcttggcggcgttagtcaggccttctccgatcatgtaatggcaattctccgccgtatgaacgtcaagcacatgatgcacgctgtaatctaaaaaacaagacagcccggaggcttctgtaaaatggttgatttgttcagtgatgctttcttttaagaacccgatctcttctgatttgctgcgaaggttgtcaatggccgagcgcgcatcagccaatgtgcccttcactctgtccattgactggctgatgatgtctttcgctctgtcagtgttaccctttgaaagatgaacatgcaccgcttcaagctgcatatgcaagctgaccagcccttgtgcaagtgtatcgtgcaagtctctcgccatccgctgcctttcgttttgaagcgtcagctgtttcacttgccggtgagcgagctctaatttttcaagcgtcatctgtgttttgattttttcatcaacttgcgcgaaaaatgttgccgcatatgtgataatcacgatcatgatgggagcggcgataacgatgaaacgaagcagatgatgcggatgctcctggtgcagggctgctatggacattaaaatgaaaagatagagtatgagcggcgttttgcccttatccgccattccgataatctgcccgattaaaaaggcatagagaccgatgaccgccgcgatatagccgccggtcatcaagttagccgatgtatatatgataaatccctgtatgatgaaataaagaaacgtttttttcttgacccagcgataggaatgccagtgcagcacagcaaaaatgacgatcaatatcgtgaataacagcagcaataaaaccgtccagctttcataaatgtactgcaaagagactgatgcggcatataccataaaaataaacgccagaccgggcacccgaagcgcaagcatatgcaatgagcgtctgtcacgggagacatagtcttcttgatgttttgtaccaaacaatctctgtccacttccttttagccgaccggcctcacgatgttttattctatttgtcatcataccataatcgcctgcttctcaccttccccttctgtcctgcttgacgggtgaaagaaaaaacagcctgcgggattgttcgcgggctgcttttgttcatatcttttttatgacctttcccgggtttcagcggtctgtctcccgcgcggcaaaaccgcccgcgcatcagaaaaacgttcaggacaccgacagccattccatgtgaacaagaggaagcgattgtgcttcctcttttttaatgtaccgtcaaatttcttctctctttttttataaacaaaatttgtaagactagagctcttttctcaggggaaattaattatgtaattgagaagaggaggtttaaaaaacgattatggaaaagcgtgaattagcggctcacgagtcgctggacttacatgaaatcattaacttcaagacgctttgtgtagcgaaatccaagctcatgcaagggcttgtgtttgatcaggatctgaaaacgttaatggaaaaagacgttcagcaagcctcgcaaaaccttgctgatctgcaggcggtttatgaacgggcaacgtttcaggctcctgttcctcaaaaccggccgacttcgatcatcaattgaaaggaaggtaagcatcattgaaccatgaccatttagatccaatcaattcattacacgtccctgaactcgcagatatgacattcgcaatggattttctcatacgcgcaaaagaaggcgtcagaaataccgccgttgctttaacagaaaccgcctcgccagatgtaagagctttgctgcgcaaacagctcatgcaaggaatcgcgatgcatcaggaaattacagacttgatggtcagcaaaaagtggtttcacccgcatgatctgagcgaacagtataaactggaccagctctctgcgaaaaataccctcatggtcggaaacatgaatctgtttcccgttgaaacgaacagaaaagggatgtttgaccgcacacctgatgaacactaacactggaggtattacagcatgaaggccgtaacgtatcaaggagtgaaaaacgtcgtcgtcaaagacgtgcctgatccgaagattgaaaaacacgatgacatgattataaaagtcacaagtacggcaatttgcggatcagatttacatttaatccacggactcattccgaacttgcaggaagactatattatcgggcatgaaccgatgggcattgtggaagaaaccggtcccggcgtgacgaaagtcaaaaaaggcgaccgcgtcattattccttttaatatcgcctgcggagaatgcacttattgtaaaaatcacctggaaagccaatgtgatcaatcaaatgaaaacggcgatatgggcgcttatttcggctattcagggagtaccggcggctatccgggcggccaggccgaatatttgcgcgtcccttttgcgaactttacccattttaaagtccccgaaacatgcgaagaaccggatgagaaattgagtgttattgccgatgcgatgacaaccggtttttggagcgttgacaatgccggcgtaaaagcaggcgatacggtcatcgttctcggctgcgggcccgtgggccttttcgctcaaaaattctgctggttaaagggtgcgaaacgcgtcatagccgtagactatgtcaactaccgtctccagcatgcgaaacggacgaataaagtggaaatcgtgaacttcgaagaccacgaaaatacgggcagctacctgaaggaaatcaccaaaggcggcgccgacgttgtcattgacgccgtcggcatggacggaaaaatgacagatcttgagttcctcgccagcggattaaaacttcaaggcggggccatgagcgcattggtcatcgcgtcccaagcggtgcgaaaaggcggaacgatccagattacgggtgtgtacggcggcagatacaacggatttccccttggcgatatcatgcagcggaacgtcaatatccgatcaggacaagctccggttatccattatatgccgtatatgtttgaactggtgtcaaccggcaaaattgatccgggtgatgttgtaagccatgtcattccgctcagtgaagcgaagcacggctatgagatgtttgacacgaaaacagatgattgtattaaagttgtactcaaaccttagagaacggaggctacagaaatggccagcgccttacatgaattactcgaaattcaggagatggcttcttttaagtcactttgcctgacgaaatccaaaaccatgaaagcgctcgtatccgatccgcagctgaaagaaatcatgcagcaggatgcggatacatcaacaaggcaattgcaggaatttgcctcgattttatctgatgcaaagcacgaataggagatgaatgacgaatgaatccgattattgaatacctgacggggatggatgcactgacagaccaaattgtcgctatggatttattgaattcggcaaaaagcggagtcagaaactatgcgatggcggcgacggaagccggaacgcctgaagtgaaagcgatcctcacccgtcacttagaagaagccatcgacatgcatgagcaaatctcacgctatatgatggaaaaaggctggtatcatccgtggaacacagatgaacaagtccggtttaatttgcaaaatattgatacggcgctccgcctgcccgtcctataaatgttttcctgctgagacagcacctctggctcagcttcagtatgtcaaactgagaactgcctttacagcgcccaggcaacgaaactcccgcgaatcagctctgcagcttctccagcctttcttcgggctgttattggggcttgcggcggtgattacgtgcgtggcggccgccgggcggttcgcaaatagagcgaagaaggcagaacaatttgttctgccttttcattattttctgccccataggcacaaatacttttcacccgattcgagcggcggttattcacgtagcttgaactcccttaaacgcactcatcacaagatcatgcacataggaatcattcacctcatcacctgtgatcaacaggcgatagaaaatcggtccgtaaatgagatcgatgcttacgtcaatatcaagattctctcttaattcacctttctgaattcccttttccagaaggcctttcgcttggaggcggcggggctggaaaaatcgcgtgcgatattcttccgccaattttgcatccagctgtcccgcaccgattaattccttaataacggttccttcccggctcgtcaaaaaccttgctaaattcgcggcgtgggtcaatatatcttgcactgttgatcctgtatcgggcacaggcagtctgtccgtagcggtcgaaagaaagctgtccatgataacggcagccttgtttgaccaccatttataaatcgttgccttactcactttggcacgctctgcaattttatcgactgtcaccgcgtcaaagccattttccaacaataggtcataggcagcagaaagaatcgccttatgtgttccttcatcacgcggccgtcctcgtttactctgcacatgaatcattccttcccgaattataaacgatacgttcagtatacttaacctgtataaaaaaagaaaacagaaacccatttacaaaactgaacgtttagtatattattcacttataaacaaaactgaacgtttagtttataaaataacttgagggaagtcttgatgaaatgcagactccaaaagcctctgcgtaaaggagatgaatcagcaaaatatttatcaaacctcataaaatcattaaaaaggagttcattcatatggctaaagaaaataaacaaacagcggatcaggggatttcaactggtttaacccttcttctcgcaacggcatgcggtatcattgtcgctaatctttattatgcacagcccttggcaggattcattagtgcggcaatcgggctttctccaagcagtgccggattgattgtcacgctgactcaaatcggatacgttgccggcctactgtttctcgtccctttgggagatattatcgaaaacagaaaacttgtcgtggtatcgctcctactaagcgcagccgctctaactctgacagcatgtgtgaagcatggaacactgtttttagccgctgcgtttttcatcggactgggatccatcgcggcccaagtgctagttccgttcgcatcataccttgcaccagatgccgcacgcggccgggttgtcggcaatgtgatgagcggcctgcttctcggtattatgctttcccgtccgatatccagtctggtcgctgatatatgggggtggaatgccatatttgctttatccgccgcgttaagtgttgtcctggcaatcgtcttatcaaaagtgcttcctgccagaaaaccaacagcaaacacaagctacaccgtcttactcggttcaatgtggaagctgctgcgcacgactccggtcttacgccgccgtgccatttatcatgcgtttgtatttggagctttcagcttattctggacgactgtacctttactattgtccggtcctgcttttcatttttctcaaaaggcaatcgcgctgtacgcattagcgggcattgcgggtgcagcggctgcaccgataggcggccgtctggctgatcgcggcttaacccggcttgccaccggaatcgctctcggtgttgtcatcgtttctttattactcccgctcatgattcagagcagctctcccgtcggaatagcagttctggtggccgcagctatcctgttggatatgggggtatctgccaatctcgtactcagtcagcgtgccattttttcgttggcacctgaattccgcagccgattaaacggattatttatggcaatcttctttctgggcggcgctataggatcatcaatcggaggatgggcatacgcctcaggcgggtggagtatcacattatggattggaatcgcttttccggtcatagcattgctttatttcaccacggagaaataagcctttcaccaaaaataagccgtcaggaccaagctgacagctttttttggggtgtattcttctttacatccatccgaacaaaacatccggattcatgaaaagatgatattgattctttacgccccgctcatatagacgggcgcatgcccgctgccgattctttcagcagcggtaaaaccatgtcataatatgtttagaaataattgtccataggcaggtgaaacacatgaagaagtatttatataaacaccttttgttagctctcgtttcgtccgtttgctttttattggtcttttatgtgggtttaaaaatgacacaggaagacacacccccgttgtcttcttacccgttttacctttttatttatctttacatagcagccggatatttgacggtcggccttgtttcagcctgtatgactgatatcttgaaaaaccgctggacattgaataaaacgtcttccattctattgaaacttatcgtttacttactcataccgtatgctatttttcattctttcttcattttaatggcgccgttgatttatgtgctgttcgagtcgttattcatcctgagaaaagcttcataatcagaaaaaaacataccgcatgctgccggtatgtttttaacatgcttgtcagttttttgcggtgattcgtttgatgttttcttccatcaagccggaaatgagctgttcgtttgtatgaggaatctgtttgagctgttgtacgaccagcccttgtcttgcggctgaatgattttgactcagctttgcctgtccctctattttgctgattttgattttaaaaccttttacccctttgttcatgcctgccagcaatttcgcatcgacatcctctaatttgtacgggctgtcggggctttcgtatttcaatacgagatcactcatcgactgcacggtttcttcctcatccaaaagctccgcctctccgtaaacatgaaccgccacataattccatgtgggaacagcctgattcgtctcataccatttaggcgagatataacaatgaggcccctgaaaaacggctaatacgttttggccatcaatctctttccattggggattcggcaatgcaaaatgaccgtataagcattcgttattcttactcatcatcaatggcaggtgggttgcatacggcatgccccccgccgttgaaaacaatgctgcgaaaccatactctttgattacatcgcacgcttcagcttcactcagctgaaatggagccggaatatacatacaaaactctcctctctgaacatggattgataaagcgctttccgctataataaaatatcaactgacatttaaaaagatacagtttcaaataaatacacatgtcagaggagaacatctgatgaaaaatttgattttcgctttcagaagcggcaccccgaaatacaaacaaatttacgagcaatttaaaacattgattgagcaaggaaatattcaggcagatgagcggctgccttccattcgcgagctggcggattccctgcgggtaagccgcaatacaacgctgatggcctatgatctgcttttagcggagggatacattcgcggagaaacacgcaaaggatattttgctaatgaaatagaaccctctttatttcaacaagaacatgatgttgtttacgctgagaaaaccgaatcaactcagccggccctgattgattttcgcgccggagccgtcgatcaaaagcattttcctctgaaaacatggagaaaattatacaatcaagttttggcatcagagaaaagctttctgtacggtgaaccgttcggcgagagaaacctgcgtgaacaaattgccgcttatctcttggaatcacgcggagtgaaaacagatgcggattcggttatcatcggcagcagcacccagcagatgctgatatatctcagccagattctgaaagaggatttttccggaattatcgttgaagaccctgggtttgacggtgccagagcggcatttcaatttcacgggctatctctggaaacgatgcctgtctatgaaaacggagctgatttttctcaattgcatgcaatgaaagaaaaattaatctatgtgaccccatcccatcacagcccttacggcgtaagcatgtccattcagcagcgccaaacactgatcaattgggtgaatcatagagagggttatattcttgaagatgattatgacagtgaattccgttatacacagcagccgtttcccgctcttgcttccattcaatcagaccgggtgatttatttagggaatttctcaaaatcctttctaccgggcatccgcataagctatatggttttgccgcagcgccttttgcaccggtataaaaaacggtttattcatttcgaaagcaccgcttcttcgcttaaccagctgaccatggctgaattgatgaaggccggtgaatggacccgccatattaagcgcatgcgcactgtctacaagcgtaagatgcagcacttgacttcacatatcaagcagcagttcggcgatcaggtgacgatcatcggcgagcagtcgggattgtatatattagtaagagttcacctgaactatacagaagaaacattaatcgaacgcgcctttcagtacggagtgaaagtataccctaccgctgtctatttcgttgccggaaagcccgaaccgccgatcataaagttaggtttcgcccatctcgatacggatcagatcacacaaggcgtacagcttttgagaaatgcttggctgtcatgaaagaaaaaaggcgccgaacggcgcctttttttatcttttatttcgtatttcttgggaatttcggcagtccaaatataatggcggcgatgccgcagattccgattaaaacgggatagaaagagtatggcaggatgctgacgggtgaaatattcccgaatttcccggctgataacagctgcgcgccgtaaggaatcaatccttgtatcatacacgaaaagatatccagaatacttgccgattttctgttgtcgatgttgaatttatcagcaatattctttgcaatcggcccggctgcgataatcgagatcgtattattggccgcagccagattcgtcacgctgaccaatccggcaatgccggcttcggcgccttttttggaacggattcgtttcgtgatgaactccagtaaaaagtcgatcccgccgttttgtttcatcacaccgaccattccgccgatcagcatggacaggatgataaggtcgctcattccggcaactccatccgtaatcgctttaaaataagaatcaaacgtcaggctcccgcccgccaatccgatgattcccgtcaaaaccaatccgccgaatatgacagccatcacattaataccgattaacgcaaaaactaacacggcgacataaggaagcaccttaatccagctgtaagatgcagcatccgtatggagggcgtggcctgccggaataaaaaataagataataacagtcacaatggcagcgggcaaaacaatcagaaagttcgttttgaatttatccctcatttgtgttttttgcgtccggactgccgcaatggtcgtatctgaaataaaagaaagattatctccgaacatagctccgccgaccacagccgcaatcggtatcgcgctggagatgccaagctctccgctcaaaccggcgctgatcggcgcaaccgccgcaatcgtgcccattgatgttcccatcgatatagaaatgaaacaagcaatgataaacagccccggcagcaaaaactgctgcggaataatgctcaaagcaagattgacagttgaatgcaccgctcccatcgcctcagccgctgaagcaaaggcacctgccaatataaaaatcataaccataatgataatatcaggatgtcccgcaccggaagcgaaccattctattttttgattgagcgatttcttccggttaaataacagcgcaaaagctgacgcaatgatcgcggcaatcaagatcggcaatttataaaaatctccggtcaccagaccagagccgacaaaaagccctacgaataagactaaaggcaataacgcccaaggattcttatgattgttcatctgggtaaaccacctcttttcagcattaaagtcgctaatcacagtctaagcaacatttcacactttaaaagtctgcagtaaaaaagtcaagctgaaaaaaggataagtaatgattgataagatagaaaaagctgttttgtttcctctctttagaaaataaaaaaaaccaaggctcgtttcccttggtacatttcatgcggcccggcgcccgggacaccttctcttcattcagaaatacattcagctttcaatctgtttttaagtttcgcttcattttccaggatatcttcgtaatcctcaatcttcctgtttaatcgttttatggtttcatcaatttccctctgtttctccgtcagccttttcctttcatttataaggatgttttttcggggttcgatcgtatgatcggctccttcaataaataaagcggtatattcaatcagcgcctcaatcgacagcccggcacttctcatgcattttataaattgaatccaattcacatcatcttcgtcataatcgcggatgccgctttcatcgcgttttaccggaggaatcagtcctatactttcataatacctaagcgtcgcggctgataactcaacctgctttgcagcctgcgcaatcttcatattcttaccacccatccttcatacctttcataagcgtgccattatagaatatcatttcataaaaaaataaaccaaaccccttgacttaaagtccgctttaacatttaaagtaaaaccgaacagaggattcatcactttatcttggaaaggaagataaccatgtgcaataatcatccgactcgtgtattaagcgctccgcatgccaaagctaaatttgagcggacgacgattgagagaagagcattacggccgcacgatatcctgattgatattaagtacagcgggatttgtcactcagacatccacagcgcattcgatgaatggggcggcggaatctttccgatggttcccgggcacgaaattgccggagttgtggaagccgtgggtgaagaagtcaccacatttgccgccggcgaccgtgtgggtgtcggctgttttgtagactcctgcggggaatgtgaatactgcctgaacggagacgaacaatattgcacaaaaggcgttgttcagacctataataacctggactacgacggaaaccctacgtacggaggctacagccagaaaatagttgtcactgacagattcgttgtccgtattcccgatcagctggatttggatgctgccagtccgctattgtgcgcgggcattaccacctattctccgctgaaacactggaatgccggtcccggcaaaaaagtggcgattgtcggaatgggcgggctcggacatttagccgttcaattcgcgcacgctttaggcgcagaggtcaccgtcctcagccgctcaatgaacaaaaaagacgaagcgcttgaatttggagccgatcattactttgcgacaagcgatccggatacatttactgagctggccggacgatttgatcttattttaaatacagtatccgcgaaccttgacgtagatgcctacttatccctgcttcgcattgacggtacattggtaaatgtgggagcgcccgctaagccggactcatacagtgtgttctccttaatcacgggccgccgcagcattgcgggttcactcgtcggcggtattccgcagactcaggagatgcttgatttcgccgccgagcacggcattgctcctaaaattgaagtgataccggccgatcaagtcgacgaagcgtacgaacgggttctccaaagcgatgtccgctaccgtttcgttattgatattgcaactttataattctcataaaaaacataccaatatctattggtatgtttttttcagcccagattattttttatttcagcagccatccgggcaccgctttgatataaaccaattcaccgatcagctcaacaatcgtctgtgtgacgataacagcagcggctaatgaggcccaagcatccggcaaagccagcgctaacggaaggactgcgagagaattccttgtgcccgtgctgaagatcaatgctcttccttcacctgtatccagacggaacgcatatgcgataaaacgggagacaaacggcataatgagcaggaatagcagatagatcggaatcacacgtataatgatgtcagcatcattgatgactttgccgatttgtgtggcgacgaccgccaataaaaccagagccataaaaggaacaggcagccacgccgtccattccaacaccttttctcccgccggtttcttatcagcccataattgagtcatcaccgccgccagcagcggcaccgctattaacaataagaatgcttccagaaacggtcccgcatgaacagctcctatcacttctttcccgataaacagccacaggtataacggaagcaataccatctgaacggcgaacaaaaccggcgtggaagccagtattaatctctcatttcctttgccgagctgagtaaagacgatgacgtaatcaatacaaggtgtaagcaataccaaacaaacccctgataatataggaggagattgaggaaaaatggcggttaacacccatacaacgacaggtacagctaagaaattaccgatcagtaaggccgccataaacttgaggtttgacatggcttccctcagcttcaagaatgggatttgggcaaacatggcatacatgagaacagcgataaacagtgatatcgtccatccccagcgaagtcctgaatctttcccggcgatccccgctattcctccgatcacaagagtcacaccatatatccaaatttgctgtttttctaatgtctctctggttattttcattggctgacacctcttccccgcccattataccttcttttctgccggaattaaaaaacaccaagggtctgtgacacttggtgttttcaggacgtgttattgttgtcaaaaccgcttacgaaagcttatttgtgttctctgtcctgccaacgaataaggtgaccgcaacactcgctgaactgaccaaagtccccagaacggcagcaagaattgtcaaaaagccattgggaatcagaaatccaatcggaatgaggcccgcaaacgtgagaacgataaaacattgatagactccggatatgattctcacaaccaagctgctaaaaaaggacatgacgaatggcggaatgaacaaacataaaatgattccgagtgagatcaataaaatcataggctcgtcaaaagaaatgacacgattgccgggagactcttcagccgccgcgaatacagcaaatatagacatcatcagcgtaagaaaaacaagaaaaaaccttttcagcaacgttatgactccttttttataaaaacgggtatctttttttcaatcacaataaccattttatgttatcaaatgaaataatatgaagtcaaaccgagttctgcacctgatttatcggttcttatttttttgataatttccatataattgtccgcaagcagcatctatatcaatgccaaattgacttctgacggtcacgttaattcctgctgactttaattttttatagaagtttacaacttgtttctcatttacttcttcaaatctcataggtgaactaacagtcgggttatatctaatgatgtttacatggaacaagttccctctcttatatctgcttcttaaaagacgtactacttcattcgcatgatcaatagaatcattaactcccggcagcataatataagcaatataaacttttcttgaggtcacacgtatatgctcatctaatgtgtccattacctccaataacgggaagcgttcatttatcggcattaacttgcttcgctgttcattaaaaggagaatgtaatgaaaacgtcaggttgacctgcggataatcctgagtgatttttttaatgcccggaataatacctatggtcgaaatagataaccgacgagggcttaaagcaaacaactccggatttgtaagcacatgtaaagcatcaaaaacttgtacattcgctaatgcttctcccattcccataaaagaaatactatcaattgaatgtccttttaagtgaaagtacaaaatttggtcagtcatttcatctgatgttaagctgcgttttaaaccaatatctcctgttgcacaaaatgcacagccaaaatgacagccgcactgcgaggatatacaaaatgactcccagccagctttatatttcatattgaccgtttctattttttcgtctcctgaaatttcaaataagacttttgttacttgctcagaatgctgcacttttaaagcagcaatatttaaaattgactctccaaactcattcattaacaattttctcaaggatttaggaagaaccgttatttcattaaaatgatttattctccctttgaacacagcatttttgatttgattcattctaaaatcaggaaacttattttgtttcaggaactcttgaattcttatatacttgtttttttgttgcatgttttctcatccttccataaaactctggtttgtttgagtaaatagaagggagtgatcatctaacctttttttaaaatcaggcacaaaaaaacaccgacacaattatcggtgttacgcttaaataacatcatgcacaaataaacaaggacattatgtcattggattatcgtttatttgacatagagaaaaagcaccgataactgtttttgtatgatgatttggcttaaaaaaggacagactgctccctttatccgccaagatgtttccaatttttgcattttcaccatacaaaattccataaatcgttatcatcgctttcacctctttcttgtcaatattaacaataatcaccatatcataagggttcccttatgtaaagttaaacaaatgcttacgcccccgctaatgacagtattataaaacttgcttattaagcctaatccaagtacagaaagcgcgctgatcacatgtttcacttatccgcgacggaacatttcttatataatgggtgaccggcagctgcctgcttgaatcccaatcttcttatagtgattttttatattcatgacagtatgatgatttgtcacttcagcaatcagatcgtttattcgatccagattaatcggtttattttctgataagctgctgaagctttctctgatttcttcaggatagacatttccggccatgcttgacaggccgttacacccgttactcagcatcttcggaaattcaacgtctcctgccgcaaacaaaataaagtgatcagggaactctgtttgtttatgacgcagaacgtctcctccttctttcagcccccttatcccgggatgccggcttattaagtctttaagcgctttctcactcagattaaaaccggtccggccggggttattataaagcacagcctctttagaggtatgactgagaagttcgtcaacgtaataaacggcttgctgctgtgtcggtcttatataaggaggaaaaccaatcagtacagaatcaatattggttttctcgatgtgtttcatcagtttgacggcatcactggttcttacggctgaaacaccgaacatcagttcaacatcttcaaattttcgctgattaacatactcaatgatctgaagacgctcatctatgctgagtgaatgctgttcaccagtcgtgccgcatatgagtaacgaatggataccgctgtttttcaaatgttcgacaatagcatcaaatccttctaaatataaactttcatcttcatgaaaaggcgtagggatagcaacattaaaatttcgcatgagaatgtcctccaagtacatattcttgaatatctgcagagtatcatataacactgtctgacatttaaaaaggtacagtttcagataacgcaacatgtcagatgtaaagccgacacacaaaaaaagcaggcaaagagagcctgcttcatagcttcgtcttacagcggcccattccccggatggcttgacaaatatgagtaataaggcaaactgatataaaaattgtgctaatgaggtggggttaatgattttagatttaaaaggtgaaacgcacatggatcatcttgtgggaacgctgtattctgccgttaatgaaaatgacagccgcttaatatccattgtgtcagacatgtcacagcaggagattgattataaaggaccaaatcatcaaccattcaatggggaatatggcatatggcagaccataatagatatcatcaagctcatattcatcagcttcgcaaatggtatgaagagaaacagaaacttggcagttaaagccgcttattaggaggagcaacgataaattcattacaaatgtctattttcactgactgccaatcaattaaaatggtcagacaaaaatcgctattacatttgcaacgtatcttaatccggccggcgcagttgtaataaaaaaagaccgctttcccctcttcttcaacgtaactgacatcatcatcttcatttttcttaacataaggttcagcaaatcgttcctcggtatattccacacattgctttcaaatgcaggtgcaattctccttgaaacagcaaatggttgtttggtttattgaattctttcatattaaaaaatggagtcattttaatgatcatatcagtctccttccaaacgagattgcatttacccattatttgttattctgcaactgaatcattatcttttatatcaggaattcttacaaaaaagtaaggtaagtgtaaggtattcgcatttattcgatatgcagtgttcattagaataagaaatataaaaggagtgatgaagaatgaaaaacatgagcattttcattattatattaggctgcctatcggttttcatattaggaggctgcgctgatcaaggcgccgtgctggaaagcgattattacgtacaaattcacggaaaagcggaaaaaaacaaaaataatagcaactacgtttacaatttagaagggtataacgagaaaggtaagaaaaagatggtttctttctttgttgaaaagccttatcaagaaggtgacattgtacgcgttccgaggagctatgagggttataccggagaatctgaagctattaaggccgagaaactgcctgaaaagatcaaagaccgattcaacattgagaaataacagcgagttgagcagatatttaagtctgctctcaattttttacgacaggttcattcgaatgcaaaatgcaggatggctccttgggccacttctacataaaagattgtgcaaattaagcacaccctccccattttctttttttggctggttacaactatcggaagtggcattgacaattcttctatggtcccaagtaattaatgaactctatagtgggcggatacgtatacggcggggtttgcagttttttaacttcttgttatttgagctatttcgacttttacttgaaagaattaaattagagagtctgaacgaggagtgaagcacgcgctccatgtgaatccatttagttcaaactgaatatgcgcggactaaaatagttgcactgatggacgtattcaacacaaaaaagagcagtaaacacgtaagttactgctctcctcagtctatccgccgttcatttgttttacaatgtattcagcatcatttcctacaccttgaagcagcgctgaacctcgcctatgctgccaaggcaaaccaataaagtacaatccctccgcagctgaaacaccccggtgatgtataattcggccttccttatccaaaacaccttctattttcatccaccaaagcggattcttaaaaccagttgcccaaataacattgtttacttctaatgaagatgaatctttaaaaatgacttcattttgctttccggctatgactctttgttttaagatgatcttcttctgtcttattgcatgttttaattcatacccaaatatgaggtcgcctttcttttgaatgaacttgcctaatattgatgtatgacttgcatgtaaaactcctaatttatcaaaccaccaaaagatgcttctttttccaatccataaagggaaataaaccggttttttactgcaagccaaatatgtaactctttctttggataactcaacagctatctgagccccgctattcccgccgccgactaccagtacattcccaggcgccagttgttttgaatgtttatattgtgaagaatgtaattgacgaatatgaccggctacatcctttgatattgatggaatgttaggggtatgaaaaggacctgcggccaccaccagattcttcgtttgatattcttcccggtttgttttaattaagaaatagttgtttaatttttggacacttattacttctgtccgtaattggatcgggatttcaaatctttcaacatattttttcagataagcagcaatttcattttttgaagggagtccatgcttgtctccttcaagctgcattcccggcaaagagctgtacattcgagaagtaaataagaccaatgagtcataccggtttttccagctttcccccacttcatgacttttatctaaaatgataaacttttgtttcgacttccttagataatatcctactgagattcctgcctgaccggctccgattactatcgtgtcgtacatatgaatcccccctccggttttatcttaattgtcagcagacaaagttagtccctatctcctcctttaatgatgatgatggtcacgcggattctcagtttgggcctgacaaagaatcgtattgtcgtgattatgcgctgccgtttccatttgaatggttacatgtgtaatgccttgatctccaagttcatgttcaattttgcgtaaaatactttcactttcagaaatggtcagctgatcgttaacaacagcgtggcaggaaagagcattcaatccgcttgtgatagaccatatgtgcaaatcatgaatgctttgaattccttctgtctcttcaattgtatgaatgatgtcagtgacatcgatattttccggagttccttccattaatacgtgaatggagtctttcgtcacatggtaaccgcttctcagcacaagaatagccacaatgacactggccactggatctgcccagctccacccgaagaagatgataaggatcgcagccagtatggcacctacagatccgagcatgtcacttatcacatgtaagtaagctcctctaatgttcaggttattctttgtatctccgccgttcagcataatccaagcgaccaatatattcacagctaacccgatgatacttatcgtcagcatgccggttgttgctatctccggcggatgagagaaacgtttgattgcttcataaatgatataaagggaaatcagtattaatgcaacaccgttgatcacagctgcaagaatttcaaatcgtttgtagccgaatgtcttatgatgacttgcctttttttcggccaatttaaaagcaatcagagcaaccattaatgagattgaatcactcagcatatggcctgcatctgacaaaagcgctaaactattggttaaaaatccgcctatcgcttctattatcatataacctgtaatcatgataaaagagatcaataaaaccttcttattggatccgccagcgtgattgtgattgtgacccataaaaatctcctccttatctaatacactgtatttattatttcttttctgctatgaagcattctaacacggacacaaaaataaccttatatgattatgtgctcatatatgaatatataggttctttactgaaatgtcaaaatattttcaatgaaaatgtttcttatcattagcttagcttgggaggttgcattgctatgaagccgcggattacagtaattactttaggcgcagataatttagaaaaatcgctgcacttctatcgggatggcttgggtctgcctacagaatacagaaggaacagccggtacagatttggacgacttgcaaacgggactgaaacttgccctctgggaccgcaaagacatcgcacatgaatcaaacgttacgataactgctcccgctcatgatactttttggggcggatacgccggtcacttccaagattccgacgggcacttgtgggaaattgtttggaatccgcactgggaatataagtgaataaccaacttttatagcaacaataaaaacacacctgaatgttctggtgtgttttttattttgtttcccacaacgatcaaactatttatacgatggcgggatgctttgcggaaaacggaatacattttcgggatcgtatttcgcctttattctttgaagccttgcaaagtttgagccgtaatatgcttttccgaagttctcgatattttgatccggaacattcacataagaacctgttacatatggtttcatcagctgacgcactctttcaactgatgcaagattcgaagcttcttgtgatttatttttccaactggccgtccattccgtataaaataacggacggcgccaatagaaggctgtttcactgcttggaactctgcttatcgcaccgccccaattgataaaaaagaaattggtttctgtcccagtcgctttttctaaaaattgtctcattactgcaataggttcttccggccaaagattgagcgcccacgccgaggagaatttaacactctgatcagacctgccgggaatcggttcatcaggatctaagaaatctatacaatccggatagtatagtgttttgattactgtttgtgccggcgttccggcatttaataaaggttttaataattgaatcagctccggttttgacccgaggaacaatccttccgcatggcacaaaccatttactttgctgtaaatctcaaggtagcatcctaatcgttcgtctgtaaacggtgcccatttttgccatgctttgaataccgtttctaactgttcccacggccaaataatattaaagacggttgcggttttaggggcacggtgaactttgaacgtatattgggtgttatatccgaaattgcctcctccgccgcctctggaagcccacagtaaatcttcattgcgggaatgatttgcttgaatgatcctgcctttggcatctaccattttcagtgcgagaaggttatcacttatcaggccgatcgatcgtgaaagcactccaaatccgcctcccatcgtgattcctccgattccgacggttggactgtctccgaacggggccataaaaccttcccgagctaaaccttttacaagcgggccgacgtgaatgccggtttgaacggttgccaccgcgtttttttcatctaagaaaacgttattcatgtcactcacatcaataacaatcccatcacttaccgtggaaagatttttatccagagcatggcggccgcttctgacacgcaaaggcacattcttctcacgagcccatttaatagcattacttacatcgtatgaattttgcgcaaaaacaaagacaagcggacagacatcaacataagggttccaattcttaaccgcctctgtatagccggggtcccctttgaagatgacacgtcccgttaactgtgctgatcccatctatttcactcccaataagcatttgattcccataccagtatatgtaggaattggacaaattcttagacagatgttctgcaaacttaaaaatagatacatatacgcgaagatgagaaaaaacaaaaaaaagacaagtgcggcaacctgccgaaactcttgtctctcctgccatgataggcacttacatttattggcgtgatatcccgaccaaactatggaagtccatagaacattatgtttgccctgccatgcgtggttctgctgagcaatctttctgtttgatcccccgacaagaatctttttctttatcgtttttgcacccctgtacggataaaatcaatacacattgaatcttatcttttacatgatgaaaagctcttattttttcttcttgtgcttacgtttgcaatcatgttttttctctttcttatgacgttttttacatttcgcttttgctttggctgctaattttgccgcttctacctttgcttcagctgctgcttttgctgcttctgccgctctggctcttgcttcttccgctcttgctatggcttcttccgctctggctctcgcttctgcttctcttgccgcttccgctcttgcatcgtcgtccgccatatcaaaatcatggccaaggtcacaggcctcgttgtatggctttttcttctggaagtactgttgatcgtcaccatcgttataatacattacgccactccttctctcattttttaatctctacatactatgtaaagaaagatctgcagcttggactggtattttgatgaaccggcacatttttagggcaattttcatttatcattgcaacagaatctggatgcctgcatgaaacttgaatgattttgacgattatcttaagcagcgtaaaaagggagactacgaaaaaaccaaggggttaaacccttggtttttttgtaaaaatgataaaaaggatgctgcacgctgcagcatccttctgtaccaactttttattgaacgattggaaagtattttttagcttttagtttgcttgctgtgtttgttttactggttctttgctaaaaagtccgacaatgttccacaagataatagcagcagctatgattacacgagccgtactgacttcttgattagtaaacaatttatagccatatattgatcccaatgctgctatgcaaaaaatattgaaccatttactccaacgcaattagaaaactccttataaaagattacatttccaaacaatatattataatattaacaaattttttcaatatttaaccttaaattattcttaagtggttttcctgatcattttctctaatcgtcattcgatctttcggagttttgatcgtttttttgttacaggctagacccagacatcattttcagctgtttgatcagttatttcctgcccggtattgacaacacctttaggttctgcaagcaaaatgttacactctgattctgcataaggtttatgttcaacatttttcggaatgacaaacatttcaccttcatttaattttacttttccatcacgaaattcaatgattaaattacccttaataacaataaagacttcatctgtttcgtcatgcttatgccaaacaaaatccccttgtactttaacaagtttaaaattgataatcattcatttcagcgattacttttggagaccattgatcttggaatgcagataatttctcttggaaattaatcggtttatattccattctttccccttcccgtgtaaaactcaatcatttaactagtcccaaattaaaggcctgtcaacctcagcagttctgaggtagtctaaaagctgaccggtatgtacagactcatggtaagcgattcttaataacatgtctcccagttcgcgaatatatccaacatcagacctgtcaatctttatatttgttaaatctgtttcgtttaacgatttgatgaatgtcaaaaacgcggcccgatacggttttgcaaattctaattcttcgcttactgtggtaaacgtttttgattcataaggattaatagtttcctctgaaaactcactcatatttttcattaaaatttgatgataaagaaattccgcttctaatacatgtcttatcatttccttgcacgacatggcttcggagtccgggcgccagtccattttttcctcaggtacagctgtccataacttgatgcttcgccgtcttacctcttcaaaatgtaaaacaataaggtcaattgtattcaagtattttcccccttttatttttaaataataattctccttcttcccggaaaaaacctcttcaaataaaaaacatatcctttcccgactcgccggattgataatcaaactatttttaagataaggagatattcattcatccatacaatagactctggctgaacatatactgaatgatagttttcatcagaaaggagaaatcagctttggcaaaatatcggatcatgacctttgacgggggcggtaccttaggtgctttaagtttacaactattgaacagactggctgaagaaaatccggcattaataagccgaacccatgtatttgcgggaaattcaatcggttcatttactgccctggcattagcaagcggaagatctccgaaggaaacacttcagtattttgaggatgaaatcctgcccgcattcagcacttcccggccgggcggacctgtttttaatcagcaattaccctattccggttttattaaagcggtacgaaactttttcccgccaggccttcgtcttaaagatgtaagaaaacgaattgttgtcccttcattcaaattatactccccggcactggatcgttggacgcccgtattatttcacaactttcccggctctccctatttaaatgagaaagtgagtgatgtcatactgcggagcagcggtgctcccgcgacacagcgcgcctatcaaaactacgtggacggatatgtagtggcaacgaaccccagtacggccagtatcgcgtttgcggttggtaaagccaacgtgccattggatcaaattgcggcgctatccatcggtacaggtgaagccccgactcggttaagaagagatacgaggggatggggaatggtaagtgcggataacatacgtcccgaaaatctgaagaaccttcctccaaattggggagtccttttggacaggtcgcctaatgaacctttactgccatttcttcagatgatctccggcggaaatggctactatgaatccatggtcagcgcgaatctgctgggagatcgctttttccggttagatccgcggattcctaacttctccaaaacagacccttccgtggttcccgctgtcattgaaattgcaaacaaaaccaacttacagcctgcgaatacatttatagagaaaaactggaacgacagcgctaaataagcaagaagtttacatcatcatacaatgaacaaaaaataccaagggactcaaacccttggtatttttaatgcgttcaatcgggccatttattgaatagaactgccccagaagtcgcttcccattacgtaaagaaagcgacttttagatttgattttcaagttccttttacaaattttgaaaaggccattgactattcagttgtactgtattaagtttaactatatagtcgaactgaatagaggatgaggatatgaaacataaattattaccgctgtctgaaaccatgcattatattttattagctctgcgtgagccgcttcatggctatgccgccatgcagaagatagaaaagatgagtaacggaactgttattttagcagccggcacattatacggcgcgattgaaaatttgaataagcatggctggattgagcctgttggagaatcaggccggagaaaggtttatatgataactgcggaaggaagcgccattttgaagatggaacaaaacaggttactgcatattttatccctgcacgaaggaagtgaatcgaatgaagaaatttaagatgttttttgatattgaaaaagaggagcaatggctgaacgagcaactacaaaaaggctatcgctgtacaaatatcagcggattaggaatatacactttcgaaaaaaccgacaaaaaatatgtgatgagactggattatcaagattgtttatcaaagaaaaaatttaaagagtacaaagaaatctatgaagacttcggctgggtttatataaacagcccatggcttagcggaactcggtattggcaaaaagaaaatgatgatcaaaatgaaatcttttcggatcgccaatcaaagagtaattattataaaagactaatggggttttcatcttgttttggtttactgtgcttgttttattcttatttgatttacaaggattcgggtttatatttaactgaaggtctgtggagtatggaaagcgcaatgttttggaaagcatttttatttgaaactccatttgccctgttgaggtcgcttcccgcccttatggctgttctatttggctgcagtttctataaaacgtatcgaaagtattcaatgttaaaagaacaataacacggggaagttacattcaaagaagtaattgaggatcatgcatctgccgaagccgggcgctttaaaggaaaaaaagcgccctgaatttgctgataaatcagatgacttattttgttaatgatacatacttatttacaatggcttgagcgagacaggctgatgaatcaacaatagtaagtccgcttcttttttggtccgtgaccatatttaaatccgtacatgcaatgataaccgtatcagccttttctgctaagtcatggtgtaattcatcatataatgtaccagcctcatcgatttgaccttgtttaattttttctattatttgatcgacatagatttgccaactatcttgatgtaaaaaatcataaccttctctgtttaacgcttcttgaaatattccggattgaaccgtaggaacggtggctaaaagagctgctttttttgagcctttaggtattttttttatggtttcatcaatcatgttcagtaaagggactgaaatcgatttttttatttgattaaaatagagatgtgcggtattacatgggatggcaataaaatcaacacccgttttttcaagctttacagcacccttaataattgcattttccatgtccgtatgattgagaggtttattcatgtagaaaggtgtcggacaggaataaatcatcatatgtggaaaatccgtgtcatgtattgctccatatattttttggcactcgtctacgactttatctacaaatggcccagtagattttggccccattcctgccagtattccaatcataattgtcctcctctgtaaaaatgtgtacgaatacgatcacgatgagttattcttgtgtttctcatctgaatctgctctcatttcttttctggctttcttctcctattttatcatttcattaattgaaaaagggctttaaaaaagatagctggcaaaccagacgacttgctttaagtaacggcgcagccgcaaacaaaaaataccaaaaacctcagaacccttggtatcattgtgatgcggctgagaggacttgaacctcaatgggttattcacccgctgggccatcaataaagtgaaactgtgttttctattacaaaacctttatatattagtgtgtgtttatattgatcatgttattttacaaagattaattcatattgtggagtaaaaatggagtcgtttttttcatcaccagaaagttacatgacatgtcttgggtgccatgtttgttaaaatcaccatcttcgttttaaaacgtacaggtttatagtgttccaaaacgctgtcctaaatgcaaaaaaatactggacgcaactaagtcaaatgtttttcacggtactatagtcaagacttgcccaagtcaccattatcaaaaagaattaataagaaaccaacgggtgatgaatcttttaatctttcattttacccgctgactcatatcaaaggagctttaaccaaattttaatagctgtcgcacttattaatagcgctaaaatccattgcaggaattttgtatttgctttttgcccaacagatgcgccaataggagaagcaatcaaactggcaatcataagaaccagagccggtgtaaaaagaacctggcccgtgattacttttccaactgttgcgccaatagatgaaagaaatgtaatcgcaagagatgaagcgactgtgattctaacagggatatttaaaatcgataacataatgggaaccaggataaaggcgccgccagctcctaaaatacctgatacgccgccaatgagaaacgctagggacgaagccaaccatttattagatatcacttcttcgtcttcgctatgttcttgtccttttttaggtataaacattaaaataactgctagtatagccagaattccgtatataaagttaattcctttttcagatatataatgagaaaagtaactccccaatacactccctaaaaggatgctgcttcccatgtacataattaatgctttatttaaaaaaccacttttacgataagcccaaacacccccaagtgtcgcaaagaaaacttgaatagcccctatccctgaaacttcatgggcagttaatgacatcactcccactaaagaaggaatgtataatagcattggataattaataactgatccgccaatacccatcattccggaaataaaggcaccaataaaccctataatgaaaagagttgtgataaaagcaatatccattttggttcctcctttcaaagaaaaagggcatctttgtattcgataccctttcacattcattagctttttttaatccagaattttaatacatcgccttcatcagtttgctctaaaagatcatgcccgcctgatttagaccaagctgcaagatcatttttagctcccttatctgttgcatgcacttctaatatttgacctgattccagttcattcatcgctttctttgttctgacgattggcattgggcatgccagaccttttgcgtctaatactttatctgatttcatgttcatctctcctctttttaatagaaacttgagttaccgtattgcacagcggtttggaccaatctccatttcacgctgtttttcttcatctgggctgattttccccatgtttgtttctcgaatctcttggtatgcatttggctgcggaggcaaatgatctgttactaagtgtctgaattctgtttcatccgcaatgttcaaaccatggttctcgctaaataatgtacttagttttttaccaacacttccatccttatttagctcgtcaatgatcataaagtgtgccggtaatacaattaaatcctgtgacaacgctttgtaacggctataaagcgttgttcttaaatctcctgcccaatcttctgccataccggctaagtctggtctgccaattgaatcaataaacaagatatcacctgaaagaagatactgatcatcgacaatgaaagaagtggaaccaatcgtgtgccccggagaataaatcggttgaattttaatctttgtatttccgatggtcatgtcgtttccttcttccaacggctgataatcgaataccgcttcttcagcatctttaggcggtaaccagtaggctgcttttgttttttcagcaatgactctgccgcctgaaatatggtccgcgtgaagatgtgtatcaaatacgtgagtaatcgtcgcactcttctccttcgcaaaatccataaagaaatctaccatacgcgtcgcatcaataatcgccgcttcaccattggaaatgaccatgtatgataggcagcctttaccgattcgaacaaactgatacatctcaccgccatcttttaaatccccgacttttaccggctctaaatgttcgctccatgctttcattccgcccttaagataggatacagaatgacctgcttcagaaagcatttcggataccatgacagatgaaccttcttttgcacaaacgaccagcacatctttatcagaaggaattttctccaagatatcttctacgccatctaaaagatcgaaatacggtacatttaaatggttaaaatcatgtccttcaatcttccaatcgctaaagtcattttcattacgtacatccaaaataaataaaggttctttgtgaaagattttttgtgtgacttcttttgcggtaagtgcttgcacggtcatgtttacatacctcctttttctgttttacctgtccagtcccgcataccgggaataacattaataacctttttaaaaccttgttttttcatggtgtgagctgccatttcacttcttcttcctgaatggcaaataatataaatttcatcatttttgtttaattcgttaaagcgcttttccacttcgccaagagggatatgcaccgctccggggatatgagcttcttcatactcctctatctctcgtacatctaaaatgtgaagagactcatcacgatccactttctgtgtgaaagcttctaatgaaatctcaggaattgaagatgcattttctgatgaatgctctcctccttttcgaagaaagtgacgaaggacttctccctctgtttcagtacctagatattcatggcctgagctttttgcccatgcttgcagatctgccgccgatcctttatctgttgcttgaatttctaataggtcaccagcttttaattcttttattttcttctttgtttttacgataggcattgggcatgacaaacctttagcgtctaatacaatatttgctttcacggtttttttcctccttttcttatataggggcgggggtatataaatatgcaaaaagttattccctggatgttaataccatgtattcataccgccttttatatttgtgatgtttttaaacccttgtttcttcaatattttacttgcctttacacttctcattccgctttgacagatcacaaagacgtctttgtctttcgaaagttgatgagtttgacgaggcaagatagacaaaggaatatttttgaatcctttaatatgccttgtacggaactcataagaagttcgcacatctataaactgtttgtctttgttttccgcctccgattttaaatcagcagttgttatttgtttaacaccatgcaatgggaaaaaacgtcgaaatacgatccaaagtattgaacattactccgctattcatagtgttatatccccccttcacttattcaattgcaatggatcacattagataaataagttgacattgccttcctcagcgtctgccaaataagcagctacaccagcatagtcgatatcatctaatagttctttttcctgtaaaccaagaagatccattgtcatcgtacaagctacgagctttacaccttgttcttgagccatctcaatcaactgaggcaacgtaagtgcattatgctttttcatcacatttttaatcattttagggcccatacctgcaaagttcattttagataaacccatcttatcggcaccgcgaggcatcatctttccaaacattttttcaagaaatccttttttcactggaatcagctcttctttacgtaaagcgtttaatccccaaaaagtatggaagatcgtcacttcatgatcgtaggcagcagcaccatttgcaataatataggctgccattgctttatcatattccccgctaaataaaacaattgttgtgcgttttgtttgttttgtcatgtttattctcctgaccaatcactattacccctgggggtatattgaaattaaaaattttttcgaaagatctcctattattcaattcaacatattaaataccggtaggggtatattataatgaatataaaaattcgtcaaccttaaagatgataggttgatgaatttttttatcggctctttaccaataagtcgaccgcttcttttactaagtgttgtgtgtcttctcccttttctaaactttcacgaacacaatgttcaaggtttgtgctcacaatcaaacccattgctcgatcgatcgcattacgtgaagcagctaattgggtcacaacctctctgcaatcttttccttgttccatcatggtcaatacaccttttatctgtccttctatccggcgtaagcgatttttaatcttttgatcatattccatgcgttgaactccttctttgaaatttatatatttgcatgttatccactatcatttcatactgcgctttatcacactacattattaactagataatgtttgtgaatcaatattatacccttacaggtatactgtcaattttcaagacggcatgagaatgattttaaagagttaatattagtatcccctgtttaatcacaagaaggcgctgaagttgtacgtgatttaatgcgtatgaagaaagagaaagcacttaattcaagcgaaaaaaatgttggataatgcatatgaatttttgattagtgaactggaagtcattaaaggaatcactgaaaaacaaataaaaagtttctgttaaggttaatgacagataagtttttcagagtattacgatcagacgttcaacttcttcaacttactttttaaacattaaccgcttttattactcctcaatctaatctgttatatttttttcttcaacgaacacttgaattctcgatgaaatagtcacttgatttttgtaatcctgattcaccctggcacggacaaggagccgtaacgatggaagagaggcagggctttcattgttttaggtctaagtgattatttccggaagaaaaaacaaccactctcccctttatctttcagaatttcttacatctcttgcgacagtgaatagcagttgtttatcttatttcataaaaaagatatgcgaattgtaacaaagaataacataccgttaccttgagaacataaaaacaaatcatttatatattccacatatcgtcaatccggtatgttatactgtaaacaatcctttgaggttttaaacctttttcttaccttgtagcatctgtccctactcgaacggtgagtagggttttttattcagtatgatacagagaacataaaaaaacaggccctatataaagagcctgtttgtataaacgattgaagattaagcagttttttgaacgttagcagcttgagctccacgagcaccttgctcaacgtcaaacgttactttttgaccttcgtctaaagatttgaatccgtcactttggattgcagaaaagtgtacgaatacatcgtctccattttcacgttcgataaatccaaaacctttttctgcattaaaccatttaactgtaccttgttccatttttgttgcctcctagtgtattacacattgtattactatccttgcccaaagtatcatcaagacgaaaagtcgatattcatactatcctttacacgaacaaaaataattctcctttatcatagcacgaaacggaaataactgcaaattaatatcatgtttcattcagggttttatttgttaaacgtgcggcaggtttttttgcgagaaccttcatttggaaattagaagttttgacggaccccttaccgtactaaataataaatatcatgttgagaggtgtatttttaaaaagcccactcacgaaaacgagtgggtttacaaaagctctaactaacccgcaaaggttttagtcagagctatttattttttgatccaactcactaagcgcctactctgtcatcagctcgataatattcattggaacgtgataaatcccctttttcataaaaataatcagctactctgattgcaaagttttcaatgtctccgtacattcttaggaggaagataccattagcgatgacgctaatggcgccctttgtttctactcagtaacttattcagcttctcccacaactgtaaagcgttcatttatatgttttggattttctatttcatccaatactgcaattgcatagtctgcatagctgatataactttcgcctttcgagttcacaagaagatgatcttttcctgactgataaaacccagttcttttcccgtctgggtcaaataccgctgaaggactgataaatgtccagtttatatcagaagtttcctttagctcttgcaagttacgaccttgccctttagctgttggaataaaaatctccgggaaatcaggtgtatccattacactgacagttttattttcgtctacataaagactccctgctccgcctacaattactgctcttgtacctattccttttaatgccctaattaatgcccggccagcatctacatgtgcctgttcttctcctaatggagctccgaaggcattaactattacatctaacttttttagatcatccgatgtaagatcaattatatttttttcaatgattgaaaccttttcctctttaagttttgcagcatctcttacaattgcagttacctcatggcccctgcttaccgcttctttcaagataagacttccagcttttccggttgcaccaatgattccaattttcaatttaaagtcctcctaatcattcaaaattttaaatgtaaccaaattgattacatgtaataattttagttacaccttatttgtttgtcaatacttttatcaccttgttaattgagcatattagagtgaaataaacttgtaatacattcagttacaagtgtactataaagagtgtaaagtaattaggatggtgaagaaatcatgtctattagcagccgttttgctgtaggaattcatatattggctcttattgaaataaatgaagacggaattagcacttctgaatttttagctggaagtgtaaatacaaatcccgccttaataagaaaaattatggggatgctgaaaaaagcaggtttagtaaatgtacggccaggtattgcaggagctgaattagcgaaggatttaactgaaatcaccttacttgatgtttatagagcagttaatgttgttcaagataaagaattgtttagtatacatgaaaatcccaatcctcaatgtcctgtaggccggaacatacaaagtacaattggtccaatatttgaaatcgcccaatctgccttggaaaaagctcttggacatataacaattgaggatgtggtaaaggatattatcgaaaaagaaaaaacggccgataattgttaaatgattcacagaaaatcttttatcagactggggataagaaaaatcaataaaacaaaaagggactggatcatattgaatccagccccgaattgatattgattttagatttagattacggtaagggatataaaaatgctcatgataaagagaaaaaattaacgacaatgcacacgatgccagattctttaatagggcgtgagtattactatccaacaactcaaggttcagaagctaagttcaaacaaagacttgaggaaatctcggattggtataaaagaaaccgcaaatcttagtttgaacgaatatgttctgtatataaaaataatgaggtatggagtgaattgataatgaattatgatgaaataaaagattactgcctaacctttccaaactcttatgaagaccacccttttggagatggttggactgcaattcggcacaaagggaataagaaaatatttgcacttatcttcactcgcgacgaacacttatgtgtcaaccttaaatgcgaacctgaaagggctgattttctgcgtggtctttttgaagaaatcaagcccggataccatatgaacaaggagcattggaatacgcttaccttagatgagggactcccagagcatcaaatccatgacatggtaaagtacagctttgaactgacaaaaccaaaaagtaaaaaggaaacataacatcgaaggatagaacgctcattatagatattcatccggtgcaatgatacagaggaatatgcaaaaaacctcaaggtagcaatttttaaattcgtatttacgagatgattttttcgttattgtgagtcctttgtttctcgacataggttgaacaaataaaaaaagagcagactcaaaatccactcaattaattaagatgattgctcatttcatccagacacctataaaaaatgaaaggtgacgatgatatgccgcaaaggtcatttagcgtttaattaatactgataactcaccttcaaacactttttcctctttctgattataggtagataacaatacagtaagtatccccgtctggcttttatttggttttttatcaataaccttaacaatagtgttcagtttatcattagggtaaacgggtgctaggaattttatattattcattcctgtcccagcaataatatcgtcttcatgacacccttcttcaatccaaagcttaaaagtaatagataacgtttgtattccagaagcaataattccattaaacctgcccatttttgctttttcttcatttaaatgcatgtactgtggatcatacacttctgcaaaattcattatattctcttttgttaattcaaaagatttagtttgaaaaacctgcccgatggtaaattcatccaacttcataaataaatctccttgaatctaaactttattattaaatctacgtagcattttaacatactggctctcacacaacaacttaacggtaaaacaattgttcccctatcaggaatgaacaagcacattgtttttgtttccttgcctttaacctctttataatcaggtgttttcttataaagaccaaggcggtcgccatcaccatcacccggcatatgtgccatttcctcataagaatctccaagcttctcataataagaataagcagtcagcctacgagaactttcttctggctgataaaacgctgaatatacttgccgtcatcatatacagaaattatggcgttatctcttttgtactcatctgaatctgctcgcatttcttttctgactttcttctcctgcttcatcacttcattaattgcattatcatatttactaccgccgcacgcagtcagcagaaggatgaaggtgactgacaaatcatacgacctactataagtaagtggacagtaacagatgaatttttataaacaaaaaataccaagggtgtcaaaacccttggtatcatagggatcggccgagaggacttgaacctccgcaggttattcacccgcttggcccgccatctatattcataaaactattgctcagttgtcagcatgtgaagtaaattacgaatttccttgttataacttttaatttcttcttcattacaaccggttttatcaaatactgcattaggtatcattgtgactttttctttaaactcattcccttcagttgttaacgtaataattacacttcgttcatcctcttttgaacgctctcttataataagacctcgctcctcaagtcgttttaaaactggagttaatgttccggagtccagatataattcttcgcctaaacctttaacagatattttttccttctcccataaaacaagaagaaccaagtactgtggatacgtaattcctaattcttttaagagaggatggtataactttatcatttcacgggaagctgcataaatcgcaaaacatagatgattacttaacagtaatttatcattcttcatgttaaattcctcacaatatttatattcattactacacataatagcataagaattacattaagggaaattgaatgactgacaatttaattaaccataacttatatacatggaaactttatttataaccaaaatgtgtttgaggtgcattcttattatgaccgatatagatacttccactatattgtttagaccgactcatagatttattgagccaccttctcaatatggttattatgtacactaactttaaactgcggaaaactgttctttattttagtctaatcattcatttagagaattttaattgcgaatttaaattgagagcaatttaatttcaaaaaatttaattgacaacgctgattagattgattaaaattcaattgtgttaaatttaatttataggagtgtttgatgatgacagtatattttacagcagaagctacaacaaaaggcggaagagaaggtcatgtaacatctaatgatcttattattgatttggatttagctatgccaaaaccaaatcaagtatccgcggctacaaatccagaacaattatttgcggcaggctattcagcttgttatgacagtgctcttcatttagcagcccagagacaacgattaaaaatcgaatcagctgttaccggtaaagtaagtttattaaaagatgaaagtgataatggttataaaatcggagttgttctggaggtggaaattcaaggggtatctcaagagcaagcggaagaattaacacatgcagctcatcaagtatgtccatattctaaagctactcgcggaaatattgatgtacaaatcattacaacagcaatgtaagacgaaagatgccaagatcaataggtaatagaataaaaaaatttgattaaaacatataggtgaccagccttcaaataaggagtgagattgatgttaaagaaagtacaattagaaaaagcagctcaagaatttgcagaagcaaccgcgaacccaccctatctattcgaccttggacctgagaaaggacgagaagctgtagatgaggttcaatctgccccaattgataaactgccagttgatattgaagatgttatgatttcaggaggaccgagcggacaggtatcagtaagaataatgcgcccgcagaatgcgcctgcgcaccttcctgtcatcgtgtacattcatggggccggctgggtatttggtaatgagcatacacatgatcggctcatccgtgagctagcagtcggagcacaagctgctattgtctttccaaattacaccttatctccagaagcaaaatatccgacagccattgaagaaatctatgcagtagtgaagtgggcatctgaaaatggccgtgagaacggcatgattcccgagagtctaacaattgcaggtgatagtgttggaggcaatatggctgctgctgtcacgctaatggccaaagcacgaggtgacttgaatatccggcaacaattacttttctatccggtaacagacgcttctttcgatacggaatcctatcaccagtttgctgcaggatactttttacgcaaggacgcgatgatgtggttttgggatcagtacacaaccaattcgaacgagcgtgctgaaattacagcatcacctctgcgtgcaactgctgagcagcttcaagggcttccatctgcattgattatcacagctgaagctgatgtacttcgtgacgagggagaagcatatgccaataaacttcgtgaagctggtgtttcggtcactgccgtacgtttccaagctatcattcacgatttcgtgatgctcaacgccttagctaaaactgaagctgcgcgcggagcaattgatctcgccgcaacctggctgcgtaaagggttttaatccatttattgtttcgtcacatagagactgctgcaaataaataaaaaacaaacagatccactcaaataattgagtggatcgtatattggaataatggaacttttgatgagctttttaatcgggctggttattattttgttgttgagatgtccctaattgaaaagctaactccacaacaaactccgttttttcaccagttcaccctcttcatatccaaaaaacctttgttgattagttagcgtacaagttctcgttttctgctttggaccccatacagaaaataaaaagccagctctccttcgggagaagaactggcataacaaagcttcttgcttcttattttgctgtattgcccggaccttttaatttctcttcgttcttgcgtcaatgttttattattaggacacaaccaataaaataatgacgatcgagaatagcaacgctgcatttgcaaagcagtaagccctccagaatataaaagagctgcagtcattgctgctcggataatcccagcttattctgagtctgtatttcgagtagtcggtcaattaaatggatgtttttttcattccttttctgtttgttccattttccaccacagtgaatcttttggattttcaacagcttcttgaaactcagctttagaagcaactgttgggtaagaaccttttaaagatttacctgaagtatctttaaataaggttaacacaactattaagccaattaaactgactgccaataaatagaaacccggcgccaaattgtttcttgtcacatgggttaaccaagaagcaactaaaggtgttgttccgccaaaaatagaaactgataagttgaatgtccaggataatgtacgatatctaatgtcagtatggaacaacgtaggtaaagatcctggcatagtaccttcgtatacagataatacaatacctaacattaaaagtcctataaataagaatgttatattccccatattaagaaattgaaaagagataattgaaaatacaattcctaatactaatccaattgttataacttttttatttcctaatttatctcccagtttaccaaaagttaaagcgaacggtaccataataatcaatacaattgctgtaaccggtgtacttatattatcacttataccaaggttctcatctaaataagaaggcatataccctaataataggtaattggttatattgaaaaatgccacaaatacgatacataaaaagatatcttttttatatgttttaatgacttctaataaacctggttgttgttcttggttttcagagatgtcactttcaaagattggtgattcatctagatgacttctcaaatataaaccaaataatcctattggaatacttaagaagaaaggaattctccatccccaactattcatttgaacatcagataaagtccagaaaagtactgtaactaaaacagaagctactatataaccagataatgtgccgatttctaaaccgctgcctaaccttatacgtttattatctggagaagattctgcgatatataccattgccccagcgtactctccacccacagaaaagccttgcagaatacgggcaaagagtaataatataggggcccataccccaatctgatcataggtaggaagcacaccaattattaaagtagataaagccatcattaaaatagtaattgttaatactattttccgaccaaatttatcacccattttaccaaaaataattccgcctaccggtctaagtaagaaggcaattgcaaatgtagcaaaagtaaatattaactttaattcatcgttttgaactggactgaaaaagtttttactaataataactgccaaataagaatataaagcaaaatcaaaccattccatcgcgtttcctatccctgtagcaaacacgcttttcttcgctttttgaatgtctacaacgttaatttttttcttgttaaacttcatttaataatatcgactccttaattatcaaatccacattatacaagcgcgtaaacggtccgagcatgcagtcccagaatgtatagcgtaatgcttctctaaaagtccgggggtttctgtttcacctgatggagagctaacggcatagtggctgattggttcaactgtaccttaaaagactagactaatatccatatcagcgccaaataacattgtaaaccaggaaagaaggatgaaattaagtgttttcgctggtttccttaacttatttttgccgattgggctaaaaataatacaagaagcaacaaaaagagaaacagccaacagataataccagcctaagcggttagtgagatatccttgggttgtggttggtattttctgcagacgatttggagaaatgattccccttcatacagctctattgtgaatatgatcacaatcgaaaaaaaacttttatttcttcaaagtagcctaaacctttattttagatcttccattacgtcttccaatatgtttattataagattgaggtcgttcctaagaattatttactgattctatctttattaccccacaatcaggtgaaacaaaacactataaacgtagcatacctttttaaaacctgacaagcccaacggggtgatagaaaccaggctaaagccaagctagtcaatggatagaagaaatttttttgtttttcccaaggaataaccgtctgcgtttaatctagcccaattagaaagaaaaagagcaggagtaatcctgctctttcattcaaaactttaatttgtatgacgaatttcgtataccttttcaactttctttaccttagactacaacagaaataagtagcacagggtatgaaataatggttttatttaaacagtcaatcaccgacaattgaatttattgcatgacacctgacaaaatttttttatccagctggaaataaagtaacattttttaaggtaatggatttatttttgttcaatgattaaatgatccccaatgacaataaagactaataattactaaaatttcaggaaaccccaatattgcttatcttaattattgtttaactaattggtaattgcaacagtaaacttatacttatggaaagttataccaaccgaaaattttccgactcaagtctgtttaaccagttgtgaaccaatgaattaaatacatcggtttgttcgatttgcaggttgtgaccagccatatcaagtactgcaaaagttgcccttgggtaatcttcgagtagccgccacgcatcatggtatccgactacattgtcctgacgccctgtgataattagcgtgggataatcaagtttagatgaaatatcgaaggtaaacccatatccattttgacgaatgttgtttacgaattcataatttgtttgtttagatggaagtaaaatttcatcccgaaacctctcccattcagttttaccttgcacaatccccatagagcaaaattcattcgcctcctctgaagacaaatgtgatatcaagtcgctgtctctttttagaacagtcttctgcggtactaccctttcatcgaattcgggtatagttaatggtgccatcagcagtaatccacgaactgtttccttacgtgaacgaacgatacctctggcaatgtaccctccatatgaattaccgcaaacaataaactgttgatcaggaataatctcgtccaaaagacgcaatatcgcttctaaaacatcatcagagttctgaatagatggttgtggcttagaatgtcccatacctggtaagtctatgtatattctcttccaaccgcttcgtttctcgaataacggttccattgcatttaacatcacctgatggtcaagtgtccaaccatgcaacataacgatcggatatccatctccaattactttatggtaaatcgacatgtagttgttccccttccctgtaatcctaatgtttcgacatgaacatttaatcctttcatacatttatcacaattttaacaaacttttaactgaacttggtaagttgaacaagggttatacattgaatttcgacaatcgcaaactgtcatatgtgtccgtcatatcaaaagaatctgtttaatgtgttgtttagtgctttcgttactgcgactatcgacaaataagaaccaagcaaagtattgtccagatactttgagtattttgatcactttgaactttaggtaagtgggcagtttgtgggcagtagatcatttaaaaataagcgcaaaaaaataccaaggatctctctattacccttggtatcattgggatgcggcgagaggacttgaaccttcacgggttattcacccgctgggccctcaacctagtaaaaacctatcatgagtttcaaaagcttttattcaaagcatctgtttattttatttatacttattttcatcatttttcatgaattccgagcacaaactgggcacctattagagaccaaggaaatctacatttcaacaagaaatatctactcatcgccctgctgtaattagtttatttcagcttccctcgcgaataccggatcaatgctcagctttaagatagtcaaccaatttctccgcactgttcttaacatcttcttttgaaaggtgaagtgtaccatattgtgcaaaggcaggaagaaaacgcattcctatatagttagcagtgatttgaaacggtctgataagctcgctgatcgtgatattatattctccgcctgcttgataatcagattcctgtgcgcctaaggagatagctaagagtagttctttgccatgcaatttagtacctccagttccataagcccaaccatgtgttaacacatcatcttcccattgtttgagtaacgcgggactgctgtaccaatacattgggaactgaaaaacgatgcgctcatgatctaacaggagctgctgctctttttctacatcaatgataaaattaggatattcaccgtacaggtcatgaaccgtaatgtcattctcttgctttaaacgattcatccaggttttgttgacaacagacgtttccaaattagggtgtataacgataactaatgttttcatttgactgattatcctttcttcgccgattagttattattgcttttacgataatgaattgaattaattttaaaatatcaactttatttacacctattttatcctttttcgtgaattcagggcaaataattgggcaccgattacatttatagccaaaaaaagacttaaccttttaaaaaagattaagccttttcagtacctttatgcccctaccctattatctcgtgtctaaattctaatagctgataatataacaaggcctctttgttttcctccatgcttagcaatactttctctgccttttgcaaattggagtttgaggcattagtaactacctataatgatgaaaatatttgtgcgacgtcaactgtagatgacttactccaggtaagtgggcagtttgtggatagtagatcatttaaaaataagcacaaaaaataccaaaggcggttaaacccttggtattattgggatgcggccgagaggacttgaacctccacgggttattcacccactaggccctcaacctagcgcgtctgccattccgccacgaccgcgtgctatgaagctgtctttccactaagcatataagctagtgatgatgatcagcactttgaaaagaaagtgcgggtgaagggactcgaacccccacgtcgtaagacactagatcctaagtctagcgcgtctgccaattccgccacacccgcgtgacaagtggtgagccatgaaggactcgaaccttcgaccctctgattaaaagtcagatgctctaccaactgagctaatggctcgctctaaaagtgattcaaaatttttaaataaaatggctgggctagctggattcgaaccaacgcatgacggagtcaaagtccgttgccttaccgcttggctatagcccaacgaaggtaaatggtgacccgtacgggattcgaacccgtgttaccgccgtgaaagggcggtgtcttaaccgcttgaccaacgggccgtctggttgagaacttatctggcggagaaggagggatttgaaccctcgcgccgcttacgcgacctacacccttagcaggggcgcctcttcagccacttgagtacttctccataatggctccacaggcaggattcgaacctgcgaccgatcggttaacagccgatagctctaccactgagctactgtggaatgatcagactttctttattataaatgatgcgacatattgtgtcaataagcaacatttattttttttgagaaagcatcgttgtctctcaacgacttttataatttaacacagatcattgaaatgagtcaagcctttttaaaaaattcttttgatttttcctctgcactttccgcaggcatatctttccgggttcattgcccgcttctttatatactgttggccgcaggcctcgcatctatacatatatgttttcttttgtgtctttttggtttgcagcggcgtgcagaatcttggcgctccgactttctgaagcaggtctctgaaatccttgtctctgtgcttgtacccttttccctcaagatgaagatgataatggcacagctcgtgcttgatgatgcctaccagctcgctccgtccgtgttcgagcagatattttcggtttaattcgatgttatgggaagacagcatgtaccggccgcctgtcgttttcagccggtcattgaaaaaggcccggtgacggaacggctttccgaaatcctgtgcagagatgtcttccgtcagcttttgaagttgttcgttatccatatgtgcaccccgctttaaaaacattgaacgggacaattcaccgttcgcatacaatgtgttaaaaccgacctctaactaaaagctgaggaggaatgagccatgccgaattggctgatgaaacaaatgcaaaaagcgtttttagaaaaggacaattaccaaatcaaactgctgaaccagtgctggtatttctacagaaaaaaacactgctcgtaagcagtgcttttattttaccatagacagcgacactctgcctttttgcacgtccaccccttcgacccatacggtgacgatgtctccgaccgatacgacgtcgagaggatgtttgacgaattgattgctcagttttgagatgtgcacaagcccgtcctgcttgacgccgatatcgacgaaagcgccgaagtccacaacgttccggacggtgccctgcaattccattccttcctttaaatcctcaagctgcagaacgtcttttttcagcaaaggcttcggcacttcgtcacggggatctcgctccggccttgtcagctgcccgcaaatatccgcaagcgtaatctcccctataccgagctcctcagccgtttcagacagcggcagtgcgctgattttctcttttacgtccgcgcttccgatctgatccgcagtgagctgcagttttttgagcagcgcctttgtctctttatagctttccgggtgtatcccggtgcggtcgagcggctcccgtcctccgggcactctcaaaaagccgatgcactgttcatatgtttttgcgccgagacgcgggatatctttcagctctttgcggtttgtaaattttccgagctcttccctttttttgacgatattgccggcaacggttttggataacccggctacatattgaagcagcgcggctgatgctgtattgacattcaccccgacttggttgacgacggtctctacgacaaaacggagagattcgtttaaatgcttttggctgacatcatgctggtattgcccgacaccgacggatttaggatcaattttcacaagctcggccagcggatcctgcaacctccgcgcgatggagacggcgctgcgctcttcgacctgaaaatccggaaattcctcacgggcgatttctgacgcggaatacacgcttgctccggcctcattgacgatgacataataaatgtcccgctctgtttctttcagcacatcaacgacgaattgctctgtctcccgtgatgccgtgccgtttccgatcgccacaacctcgacttcgtaccgatccagcaattctttgattttttttcgggcttccgctgtctttttgacgggagcgtgcgggtaaatgacatcgattttcagcacttttcccgtctcatcaacgactgccagtttgcaccccgtgcggaaggccggatcgacgccgagcacgacttttcccttcatcggcggctgcagcaggagcttacgcaggttttcagcgaaaatatggatcgcctgcgcgtctgctttttctgacagttctttgcggatatcgcgttcaatagccggctggatcaggcgtttataactgtcctcaatggcttctttcagcgtttctttcacaggtgtttcacggtgtttgatgatttgcttttctaaataagcttttatctgatcggcgggcggttcgatcgcaatctttaaaatgccttctttttcaccgcggttcatcgcaagcactctgtgaggaacgaccttttggatcggctcttcgtactcgtagtacatctcatagacgtttttctcgtcatctgcggctgacttgcctgccgcggaagtgagaattccttttttatacgtttcctggcggatccactttctgaaatgaggatcatccgagatttgttcggctatgatgtgcttcgcgccttcaatggcttcctctcttgaagcgacttctttttctgcactgatatattgatcagcgacgtcgtgaaggcggttttctttcgggagagaaagaatatagtccgcaagcggttcaaggcctttgcttttggcgacggtggcttttgttttccgtttttgtttgaaggggcggtataaatcctcgacttcctgaagcttgaccgcttgctcgattttttgcttcagcccgtctgtcagcttgtcctgctcggagatcaatctgatgacttcttctttccgctgcgtcaggttttgtatgtattgccaccgctcggagattgcctgaatctgcacctcgtccattgagccggtctgctcttttcggtaccgcgcaataaacgggacggtattgccgtcttccagcaggcggatgacactttcgacatgtttttgggataacgctgtttcttcagcaatttgttttttcaaaagggctaacgtttccatatcacaaaagcctccatctcttctttctttctctagtgtatcaaaaaacggcggaacataaaaaaagcagccttacgataaaagctgcccgagaatataggtcaaatcatcacgtctggatgttgtgtacggatgaagtgattttgatatttcttctattgagtgtccctgctttaagcaggtgcggatatgcggaacctcaagcccatccgtgtagatgatgaatgtcgcccctttttcgtatgatgacgtatacgttttgtatctttgcggtttgcctgagaggtaacccgaaatcggcagcggatgaaaaacttcgcctgatggggagtgcaggaagaaacggacgttgccgatcgagcagtatgtcaattcccttttgatgaaattgatttttaagatggaggcagtcgcccctcttttgtttttcatcgcttgattgcagcgctcaatgatgctttccacatcctcatccgcatacgtttccacgatgtctttaatggctgacgaggattcattggcaagagatccgctgccgagaccgtccgctaccgcgcaaactaattcttcttcattcgccttcataaaaaagctgtcgccgcatatggacttgccttctttatttaattggtatacaagagtttgaacatgttcattttcttcaacctgaatcattacattagctccatggagggatctccaatcaaggcctctctcagttttttcaccgctttccgctgcaggcgcgagacgtgcatttgagatattccgagaatgtcccctgtttctttttggcttttattttgcacaaatgttagatcgataatctgtttttcgcggtcggacagcacatgaagcacgcttttgatcatcatctgctggttgacgcgttcgtatccttcctcctgcgacccgacgatatctaaaattgtgacggtgcttccgtccgcatccgcttcgatgctgtgatcgacagaaagcgcctgatagctttttcccatctccatcgtttcaagcacttcctcttctgacacatcgagaaaggctgcgatttcttcgactttcggcgaccgctgcgtctctgtcgtcagctgatccaccgccattttaatgcgcggcccgagttctttaatccgtctcgggacgtgtacgctccatgttttatctctgaggaagcgtttgatctcgccgatgatggtcggaatcgcaaatgcttcaaaggatttgccgacctcgggatcataccgtttaatggctccgagaagtccgatcatcccgacttggcggagatcttcgtgaaagctttttccttttgaatatttctttgccagcatttcgacgagattggtatacacctcgacgagtgtttcctgggcttctttattatcatgtgtttgaaagtcgcgtatgagccgatcaacttcatctttagttagtttcgtagtttttgatggttgtgccatgatcaactcgctccccatttaaatactttgtcatcgccacggttacgccagagttgctttgaactttgacttcatccatgagcgtttccattaaatacagaccgagccctccttctgacaattgatcgactgtgtgcgaaggtgtgtacggcccgagatcctgctgcttctgatcaaaatcaaagctgtctccctgatcggcgacaatgacctccagccgatcctcaaacacaccgaaccgcacggatacttctcccttattttcatctttgtatgcatgctggacagcgtttgtacaagcttcgctgacagcgatttttaaatcttcaatgtcatcataggtatagcccattctgctggcgactcctgataatgtaagcctgacgattcctacatattccggttcggccggaattttcatctctatataatcaactgatgtactcattgcacgccaccttctgactttgccgaaatgtcgatgatgtccttaagccccgtaatttcaaacagacggacgagccggtcggaaagattctcaagcttcagagagccgccttccttgctcaccgttttaaacacgcctacaaaaacacctaaacccgtactgtccatatagtttacatcttttaagcagattctcatgtccttcccctcgtttgccaggggcatcagcttttcacgaaccaccggagctgagtatacatcgatttctccagcgatattgatttgtatatctgaaagattctccttcatatctaccgttaaattcatcgtatcacctctgaaagttatccttactcgtgctaatggctttttacccgtgctgccgtttttttaaacctttcttttcaaaacaattaacgtaaaatcatcatgaagctgaaagtcctgaagtctcagcaggctgtcgtaaatatttttgaccatatcctgcgcggagcagtccatatgttcttccagcatgcgctgaatgtcgctgcgttctaagaaaccgttttcggtacggcattcggtgacgccgtcagaaaaaagaacgatcatgtctccttcgtccatgtgctgttcatattggctgtaatcaaaatcctgggaaattcccagcaccaatccttttgcctccagatcataaaactttttttctttttcagagtagtagaagcccggttcatgccccgcagaagcatatgtaaattggtgatttttcgtattgtagtttgcgtaaaacatggtgataaacatgcttgagtccacgttctgttctacaacgcggttaagatttttcagcacttgggaggggtgaatgccgatctccggaagagagtccatggcatacttgatcatcgacatgcacaatgcggcgggtattccttttccgatgacatcggctatcgcgatgttaatcgattccttgtctttgacaaagtgataatagtccccgctcatttgcttggcggggacgctgatcgccccgatatccagttcttcttcttcaggaatttttgtgcccagcagcgtctgctgaacatttgcggcaatttcaatttctgaacgaagctcctgctggatatctctcagactttggtgttcctgataagccatcccgtagccaatcatgacttctattaaaaaatccagcgaatgaaaaacatcttccggcagatccggatacagttcctttaccacttttcggtggatgctgatgatctcctccggaggaacctgatgttcaatcgtttttcggctgaatttttgggcttgatataaagatgtttctgttaattcggctatatatcggctaagcagctgatgataccgctgctctataacctccctgaaatccacgttctaacctcctaccgaagccattttacggcttgaatctctgttccttcctctgcaacagattgcaggctgaattcgtccatcagccttttcacgcccggaagtcccgctcccagtccgcctgacgttgaaaagccgtcttccatcactttacggatgtcggggattccgggtcctttgtcttctgctataattttaaggccttttttccctctgtcgtttacttgttctatgctgacctggcccttgcctgcatataagtaaatgtttctggccaattctgagatagccgtcgtgattctggcctggtccaccgtgccgaagcctaattccttcgcaacgttgcggccaagctgtctggcggctacgatatcccattctgtcatgattttcacacaggattggtcgttcatcgctattcccccaattcccgcttcaatgtctcaagcccttgctctaaatcgagcgccgtttcaatttcctcaagtgagattccgagttcaatcaatgtgaccgccacagccggctgaattcccgtcaatacgacctttgcgcccatcaatttagacatggtgatgacatcgccgagcactttcgcgataaatgaatcaatcatgtcaacggatgtcaggtcaatgacgaccccgtttgcgccggtttcatagattttgttcagcagatcttcttgaaaatgcaaagctgtctggtcgtcaagctcccattggatggataccaataagcagttatacagtttcaggatcgggatttttggatgtctcacaatgttattcccccaatgaaacgatttttcgatttgtcatttcaagcgctgtttgaattcctttttgaagggtattcttcgtaataacctgcgacaaatcaattcccagattaacgatcgtctgcgcgatttccggacggattccgacgagcagacatttcgcgccgacaagccgcaccgcttctgatgcctgaataatatggtgcgccaccatcgtatcaacgaccggcacgcccgtgatatcaattaatacaacctgtgaacggtgctttacgacgccgtttaacagattttccataatatgctttgcacgctccgtatcaatcgtcccgacaagcggcatgaccgttacatgctcaaataccgggatcagcggagccgacaattcctgaagcgcgattttttgcaaagtaaccgttttttcccaggagatagaatactgatttaagatttccgtgttgatcggattgaaaaagctgtctatttccaaaatcaaatctgctctgtcctgatcggccatattaaggtcgaccatcgtttcgtaaagcagtttccaaaactctgacagggtggctgaaagaagtttcagcgacaggccgagctgaacggcgcgcagtgcgagttcactgatctgctcttcggcagcctcgtcattttttgtcgataataaaagaatgtctatataatctttacaaatattttcacatatgtgattcgtaagctgatagtcttcctgattgcctacttcttttagtttggctgtccaagtatcaagcagttcatcatgctgatcaataatgaactgatacactttctgattcgacatgggtttcactgacctcccgacacaaaacaacaaattttgtttgattatttctttattatagcgcttatgtttttcgaaaacaaaaaaagttgctctatatgagcaaccaaaatatgactaaaaatcaatgagtgccaaactgatttgcagggcttcatcaaccttatccatcatttcatcatccagatgagttattttatccgttaatctttgcttgtcaatcgtccgaatttgctccagcaaaataacggaatctctttcaaaaccgtagcgttttgcatcaatttcgacgtgggttggtaatttcgctttctgtatttgggctgttatggctgcaacaatagcagtcgggctaaagcgatttccgatatcattctggatcactaaaaccgggcgtacgccgccttgctctgagccaacaacaggagataaatcagcaaaataaacatcgccgcgctttacaatcaaaatgattatcctccgctgactaagcgctcaacggtcgtttctgcttcgcactcagcatagtgagcctcagaagagatattcaagttgattttcgccatttccatatacccgcgtctcatcaaatcacggttatggcgagttgtccgttcgctgacatacgctctcactgcttgtgatatcagttcgtttctgcttcgtttctcccgcatcgctacaccatccaattcagctactaagttttcgggcaagctgattttcatttcggttcttgcgctggattcagacaaaaaacatacacctccaccaaacttacggatacgaccaattcatccatccagacataatgataccattattcaaacgtcaagcaaagctgttttataaattctctttttccggatgacggctacttgtttgtattatcttgcagtaaaggatttcttacttccattatactctcattttccaaaaacatacggggaacgcgggaactaatggtacaagggacctcgtaattaatcgtctcaagccgccctgcgatttcatccatcgtgatcgtttcttccttctggctgccgatcagggtgactttggtgcccggcggataagattgatctaattcgaccatcaattgatccatgcagattcttcccgcgatgttcatccgtttgccgccgatcagcacagacgtgccgctcagcttgcggagccacccgtctgcatagccgatgggaaccgttccgatccattgatccttctctgccgtatatgttgcgccgtagctgacgctttcccctttgcggatctttttcacatgggataacacagagtgcagcgcaaaagccggctttaattgaaacggaatttcgctttggatgtcagcagaaggacgaagcccgtacatactgatgccgaaacgaaccgcgttaaagaagccttttttaaggcgaagtccggcggcgctgttcgcgcagtgcaccatcaattcttttaaagggagcggagcgatcaatgttttaaagcggtcaaactggaagaggaaataatctctgtttttctcatccgcggtagcaaagtgggtgaaaacgcctttacagactaaaccgggattttggctgaggatttttaacacgctttggatttcttcctccgttttgactccgagtctgttcatgccggtatcgactttcagatgaaacggcaatgtggcacctccgaggtggcgcgcagcttcctgaagccattcaacagaatatcccgtgagtgttacgtcatattcggcagctgcttgtacatattcgggcggcacggcgccaagcacaagaatcggcgctgtaatgccccgttttctcaatgaaatcgcttcatccagtatggctacggcaagacaagaggcacccgcttcaagcgcggctttcccaacttccaaatctccgtggccgtaagcgttcgcctttacaaccgccatgagatggacgttttgcccgatgtgttttttcatatgcgtgacattttctttaatcgcggacaggttgatttccgcccacgtttctctgtaaaaggatgctgtgttcattcgatacacttcctagcattattttcaattcatattgttattatcatactaaaattattctgcaaagtgaaatggaatcaaaaaagagaccgacagcggcggcctcttttttgacattattttgacgactgtccctgcatgcttttggcggcggccaccatttcatcctttgtcagatcctgtgatgacagaagataatccactccgtcatatgtccacgttaaagacgtatcagataatgcggccaccgtgaagccgagattaaccggttcgcctttcagcgtgacggcagaggcggcttttgcgatatgggctttttcttgaataagggtgaaggatttttctccgccgtaagtcatgacgatccgtttgccgtccgccgttgaaatatctttctcttcaagctttttgacgccggccggcacttgaagcggtgttttgaccgcaaatgaatcagacggcttggcgcttgtggcgacgtccatctgggaaagcgtcatatttttcttctcgtcaaaagagtctttatcaaacggcttgttgaattcaaagcttttgaattcgacttttaccatcactttccggtctgtatccatgactttgacgagcgaagggctcatgtcctttttgttgaaagtgatttcctgagtcggcagcattttgttgtgctgatagtttgtttttgtttcaaacgtgtactttttatctttggcggaatagacggcgtctttgtcatgctgcacgtcctttacaagtgactcaaacaaatatacttggctgctgttattcggccagtcgctttggaacctgaagctcttatttaaagacggcgtaaggacaaagactccgttggcgttccgtaaaatgacttggttttggtcttttttcggattttccagatagacccggtacagggaaggttttttatgccagatttccacattgtatacttgcggatcactccccgtctgaatggtcattttggctttcgctttgtacgaggtgtattctttcgccttcttatctaaaccgttcacgatatcttcctgtgatttttggccgcaggccgaaagaataaggacggcaagcagtcccgttaaaagcaaaacaaagctttttctcaccttttttcaaccccttcttctcaattgatgtaaagggaagaaatcgcttgtttgactttaacggtacgccctgaacggacggacgcgtaccataaaagcctcaaacaacttgtctcccttaatgcactatcaaatatatgaaggggtttcggctaatatgcagactagcgtgacaacctttcaatcacgacctgtgccgcggcgtattcttttgtatgggtaatggagacgtgaaccgccgcgccgtccagcttggcgcaggtcagcaccggcttgcccgccgtgtcgtttccggtttcgatatcctgaaagctgagctctttgccgatacccgttccgtatgctttcgaaaaggcttcttttgccgcaaatcttcccgcgagaaattcaattttccttttgtccgacagcaatgtaaaacgggcgtattcagcctccgtcaatattctttgcggaaacctcgcctgccggctgagcatgttttcaattctgtgcagttcaacgatgtcgattccgattccgaaaatcatgtgaattcctcctaaaagtccgtactaaaaaacggtttatgtcataaacgtgttactatatatgtaacaaatcagatgcaaaggggcttgcgatgtttatacgtacggaaaatttccagacttttatcagacgttatccggccgtcagctgtatcttggcgctgcaggcgttcttgtggctgtttttcagtatgccgcttcattccgtcatgatgtggtcagatgcagtgaccggctataattacggcgtttcctcgggagaatggtggcggctggtgacaccgatgtttttacatgcgaatttcactcaccttttgtttaactccatgtctctctttttattcgcgcccccgctggagcagatgctcggaaaagtccgttttttgattgtgtacatcgcatcgggcattatcggcaatatcggcacatatcttgccgaaccgcttgattatgtgcatgtcggcgcatccggcgcgattttcggacttttcggcgtgtatgtgtttctgactgttttccgcaaggagctgatcggccgggaccagtcgaaaatgattatgaccctgcttatcatcgcggtactgtcgacgtttatcaattctaatattaacattatggcgcatttgttcggactggcaggcggatttttgctttcctttttatgcgtgcagcaaaaaaagcggcggtattaaccgtccgctttttcatatgaataccagcgcccgatgcgttcggcatcttcctcgctgacatccttcagcatgacatgctccatgtggtgagctgatttcactgcggtagccacagatgcgagccgccttcttttttgcagaaaggagcggctgacttcaaacatctgcattcttcttctcagcataatcgtggtcgtcttcccgatcagccgtgtggtgagctgcagccggcctccgtttaagcaccatgacgcgctcttaaatgaggcgtagcccagcaccagttcgacgggaagcacaaggagcgatgcatacccccacggtttaaacagaatacaaagcggaatgatcacgaaaaccgagaagataacggagcggaataaataccggcgcagcgcccttttcggcaaatgattcctattttcttccagtacgtaatccggtgtgaaaccgttcagcatcacaccgagctttgatttgcggatgatcggaaacagaatcgtctgagctccttctttctcattccccgcactgccggcgctgacaatcgcaaccgtcgcgtatccgaataactgcctgatcacattttctttaattttaatggcttggattttacggagcgggatggtcacttgatgtttttcaataattcctctcgtaatgaccaattcgtgttcctttttttctatcttaaagttggcatgcttgatcatcataccggcgatgcttaacagccaggcgatgaacaatcctataaaaatgatcacggcgtatatgccgatgctcgcatgcttgagaaaagaaaacctgtcgtagaaccagtccatcggaagtacttcatcaagctgagaaaagagggcgaataccgctgagatgatgacaccgatccccccggatgttgaggcggccataagcagctcacccacagacaggcggtaaacggattgcacatcttccccgcgcatcggctcctgctccgctgcggtctcccctcgttcttcttgctccgctttttgctgaaaaacagccgctctgatccgttccgcctcttccacagtaatggcggataagacggcctcggcgtttttcccgtcgccggccgtttcgatttgaagcttaacaagcttaaaaagctgctgaacgatgccggcactcgtattcattgattgaatccggtcaatggagatgtatctctttttcgtaaaaaacaagccttcttcaattctgaattctccgtcctcaatccggtatgtaaattttctccactcgatcacacttgccgtaatcagccagataagcaggacagcgagcgcaatgcctccgtaaaagcggatgaagtggttggaattaacaatatagacgagaaaaaatggcagaataatgtttttaatggtttcgataataatatggaataagttcaaaatcacggccgccgggtgcagacgtttcggttcagacatcatcttccgtcacccttgccagacgggaaatggaatccctcagccggtcagcttcctccatatcaagcgccggaatggaatgaacggttgccgccgtagagattttgactgaggccaggcggtaccttctgaggagcgggccttgtgaagtatctacgtgctgcaccctcaccatcggcacaatgacccgtttgactataaaaatgccggattgaatatcaatttcattttcatggacctcatagcgccagatcctgtgcctgattttcggtatggcatagacggatatcactgaaccgatgacccaaatgatgccgaggactccggtgatccaatacggccaatggaagaaatggcttaaaacagctgctgctataacggccagaagacagaaggcggacaggatgatttcctgaagacgccagacttttaagccgcttggactgattcgattttttggctgtgctctcaacatacctacctcccattttttatcatacatacaaatacggctgatttgcaaaaaagattcactttccggcatatcgaaaaaaagcggaccccgaaaaagggtccgcttcctgtgttttagtatgattttttctggcgtctgtcacctgaagaacggcggtcgcttgagcgttttttatcgtaggaagaacggttgttgtttttccctttgccgccgcggtagccgccgccttggccgtctctgcgcttagaagtacgctggtttttatagcgtttgctgaccatcggcgcttcatcagtgaggcgtacaggcgtgctgtccggctcttttgtcgccattttaatggctgcagccacaactgtcactgcatcatgatcttctaacaattccgcagctgccgtcatgtagaagttcaggttgttttcgctgatcgccgtgcgcagacggtcaaccgtcacctgctgctgaccttctaatgcttcgtcaagcgtcggctctttcatgcggtccattttgcgttttgtcgtttgttcgatcgcgcgaagcatgtttttctcacgcggtgtgataaacgtcatcgccatacccgtttttcctgcgcgtcccgttcttccgatacggtgaacgtaactttcaggatcttgaggcacgtcaaagttgtatacgtgggtaacacctgagatatcaagtccgcgggcagcaacgtcagtcgctacaagcacttcgatcgcaccttctttaaacttgcggagcgctaccatacgcttcgcctgcgttaagtcgccgtgaattccttcagccgcatatccgcgaaggttcagcgcttccgtcaattcgtcaacacggcgttttgtacggccgaatacaatcgcaagttccggagactgaatgtcaagaagacgagtcagcgtatcgaattttttgcgctcctgcacttccaagtagaactgctgaatgttggacacagtcatttctttcgcttttacttttacgtgttccggctcagtcatgaaacgctctgcgatccgtttgatcggcgcaggcattgttgctgagaataagagcgtttggtggtcgctcggcacgtttgagagaatggattcaatatcatcaatgaatcccatgttcagcatttcatcagcctcgtccatgacaaccgtgttcacgttgtttaaacggatcgtgcggcggttgatatggtcaagaagacgccccggcgtacctacaatgatatgcgggtttttcttcaatgcgcggatctgacgtccgatatcctgaccgccgtaaataggcagcactttcgcacgcttatcttgtccgattttatataactcttcagatacttgaatggctaattcacgggttggcgcgattacgattgcttgaatattaggagactcggggttcattttttcaacaaggggtataccgaacgcagctgttttacctgtacctgtttgcgcttgtccgatgacatctttatttaaaagtccgagcggaatcgtttgtgcctgaatcggtgttgcttcttcaaatcccatacgattgattgatttcatgagatcagaacttaattggaaatcttgaaacgttatagtcaaattattcaaactccttctgattgctgtttcagtaatgtcgtgatttaccactaaaaactgccctttcatccaaaggacaggatcatacgtatacaaagcccgaattactttacgtttaatcttaccattacactatgtgtttttcaataaggcgagatggtcaggcggccggaagcggcctgaccggattcttcccgcaaacgaggccggaccccgcgccggacgggatttcccagccggcggcctttctttttcatacggacagaattatttcaccctgaattagtttcttcatttttgtatatttttataatgctgatcagtattttttcagttcttctctaataaatctttaacgatttcttcgagcttcatacctctcgatgctttaaacagaaggagatcgccggaagcggccatatcctgtatggcgtgaagcagttcttttttgtcgagataatggctgacgcgcccttcttcaaaatgccggcgcgctccgtctgcgatgaatgcgccgagtgtgccgtaagtaaatacatggtcaatttccgccggattgatcgcagctccgcattcttcgtggaatgctttttcttcatcaccgagttcaagcatatcaccgagcacgagcattttcttccgatagcctttcatcgtttcgattaattcgaccgccgctttcattgacgtcgggctcgcattatacgcgtcgtttacgatcgagatgccgttttccgttttaaccagttccaatctcatccccgtcaccttcaggcggctcagtcccagagcggcattttccggcgtaatgccgaaatagatgccggcggcgtatgcggccatggcattcatcacattatgtctgccgagaaccggaataaagaaagaacgttcgatcccgtcgatattgaagtacgtgccttcttccgcctgttttatttctttcaggcggagatcattgacagcgcctgcgccgtatgtcgttgtccggcaagtgtacgccttttcgcggagcaacggctcatccccgaaataaaacagaacgccgtcttcccgaagtccgtttataatttcaagtttcgcctccgcaattccttctcttgagcctaaatcctgcatgtgggattcgccgatattggtaatgacggcagcttccggttcagcaagacggctcagaaaatcaatttcgcctctcgcgctcattcccatttctaaaacggcgatttctgtatcttcaggcatggcaagcacggtcagcggcaggccgatatggttgttgaaattgccggcggttttgtgaacacggtactgagtgctgagaacggcgtgaagcatgtctttcgttgtcgtttttccgttgctcccggtcaccccgatgacccgtgtgccgagttctttcaaataagctttcgccaatgtctgcagcgcctccagcgtgtcatcgacaaggatgacggcacgctcttccggcggattcggttcagagcggtcccacaacaccgcggaaacgcctttttcgaatgcttgcggcacaaaggtatggccgttaaaatgctcgccttttaaaggaatgaacagctgatttttttccaaagtccgcgtatcggttgcggcgccctcaatcattgtttgttcaaatacaggatttgtcagtgtgcctttgaccatgtcggcgattcgttttacagttcgctttatcaaaggtggcacctcgctttctgaaaatgttgtctgttacgggaaaagacactgccccttcaggcagtgtccgtcttcattaaaatgtatgtttaatcagctgtttttcggcatggcgttcttttgccagctcaaccagctgttcgatcagatcactgtaatctacgcctgcttctttccaaagcagcgggaacatgctgaatggcgtaaagcccggcattgtgttcacttcgttaatgagcacttgaccgtcattggtcaggaagaaatcggcgcggacaaggcctgatccgtcaatcgctttgaaggctttaatcgccatctcgctgatttccgcatattgttcatccgtcacttgcgcgggaatcattaaatccgtgtcgccgtcttcatatttcgctttgtaatcgtaaaagtcggttttcggcgtgatttcaccgacggcggaacatttcggttcgtcatttccgagtacgccgatttcgatttctctgccggcgattccttcttccaccacaattttccggtcatactcaaaagccagttcgaaggctttttcaagctcttcgcgatttcggcatttgctgattccgacgcttgacccgaggttcgccggtttgacgaagcacggatatcccagctcctcttcaacctgctgtaagcagctgtccggcgtctgtttccagtccttttttaagaaagcggcgtacttcgcctgcggaagccccgcttgagcgaacaaatgcttcatgatgactttatccatgccggctgatgatgcaagcactccgttgccgacataaggaacgttcagcaattccagcagtccctgaatggtgccgtcttcaccgttcggtccgtgcagaagcggaaatacgacatcgatctgcgccttttcgtcaggcgacgcttcaggaaacatttcccggttcaatgctgatagagcgaaactttcaccgttttgttccagctgaagcattttcacgttggaaaccggctcagtcagcagcgggcctctttgccattctcctttttcagtgatgtaaatcggatgtatatcaaacttctcagtattaagcgcttttgttacagctaatgctgtctgcagcgatacattgtgttcggctgactttccgccgtacaccaatcctagacttgttttcaatggatattccccccacaacaattcatctttactatcttatcactttcctcagaaaatgatctaattatttttgggcattctgaatatgaaagcatttgtatgtaattcctttttattttatattaaaatggcatggaaaaggagatgtgtcatatgaaaaaaatcagtacaacagaacaatttaatgaacttattcaatccgacaaggaaatcatcgtgaaatttttcgctgattggtgccctgactgcacgcgcatgaatatgttcatcggcgatattttggaagaatataatcaaaatgattggtatgagctgaacagagacgagctccctgagcttgccgacaaatatcaggtaatgggcataccgagccttctgatctttaaaaacggcgaaaagaaagcgcatcttcacagcgcaaacgcgaaaacgcccgaagaagtcacagagtttttatcacagcatatttaattcgtttcacgatctttgtttatgacttcaggctctacatgaacatggacatgagtcacatcatgttcatgttttattgcatattcgacttcatcggctacttcatggccttctttcacagacagtcccggatctaccgtaatgaccatttccacatgaaccgtgctccccaaataccttgctttcacatccttcagcctgctgacctcttttatttctttcactgtgtgtttatacggctccaaatctttcagatcaaacccgtccgttaatgagtgggaagcatctttgaagatgtcccatgccgtcttacagatgataattccgatcagaaaagcaatgaccggatcaatccacggcagatgaagccgggccgttaagacgcctatcaacgccccaatactgacataggcgtcagaacggctgtctttcgccgccgcatgaagcgcagaacttttaacccgatccgcaagacggctgttatatacatacatgccgtacatgacaatcgcgcttcctagcgccgtccatgccgcaatgaagctcggctcggcctccgttccgctgacaatcgcctttgctcctccgatcagcacttcaataccgaccgccatcataataaaagacgcaattaatgaagaaattgtttcagcccgataatgtccgtaggcatgatcactgtccgcggggcgctgggaaatccggagcccgatcagcacagccagtgatgcgacaatatccgtagcattatttaacccgtccgcactgagcgcttcggaatgataaataagaccgatcaccagtttgacggcggcaaggataaggtacgcggcgatattaagaatcgcgcctttttcgccccgttttaagtttgccgtttgatcattcatgtaaggactcctccattctcattcatagtatggatggaaaagcggaaaaatagcagctttgatctgaccaaatgcaatattcgacagcattattccccgggaaactatttgtcgaaaaattggcggtatttttcctttacatatgaatatgtccattgtataatttcattaactgataatgattctcaatatcaattgattaggagggtaatcatgaggtcttctcctcagctcagatcatcagttgaaggacgaaaaaaacatctgatccatttgctgatcaataacggaatatacaaaaagtcggaacggcatttatatgaattatcgctcggagaattagaaagcgaatacaaatatgtaaggaaggtgcgggctcatggcgaaacgtaaaataaaaacatacgaacagctgataaaagaaaacaaggcggccattatgaataatcaaaagctgatgaatgtgatctatgacagaattgaccgcaagcatcaaaaactgctccggcacaacagccatacataaaaagagcctttttcaggctcttttttttattgctcaaaggcttccgccgctaatttgccgatgaccgcatcgtccatcggcggattgtgaaggccggcccgggcatcccgataataccgctgaagcggattatttcgctccaggctttttgcgccggtgattctcattgctttgtcaacaacagaaaggacggcatttgtcacaatatgttttgccgcgccgagctcgcttttgatgaaagggcggcgtttcggatcatcatacatttgcgccgccgtgaagagaaactgtctcgcttttaacaattcaagctccatttccccgacacgctgctgaacggccggcacgtctttaatcggtccgttcaggctgttcggcgaatattcagatgcaaaccggacggcatagtcccttgccgcttgagcgatgcccagataagcagcgggaatgtgaagcagccagccattcactttcgccgctctcggcccgctgataagctccacaagccgctcgtcactgaccgtgacatgatctaaaaggagatcatggcttccggtcgccttcatggcaatcatatcccatgtttcttcgactgaaacgcctgcctgatctttatgaatgagaaaaacaccggtcgtttgtttttcttcaatccatgccgtcacaagcatataatccaaagtcagtgaaagggttgtaaaggtttttcggccgttcagcacccattttccgtcttttttgacagcggaagtgccgggtcttcctcccctcgtcggactgccggtctgccgttccgtcgctgccctgttcaggacggctccctttttcacctcttttgtgataaatgaaaagacaccttcatcccagctgtttccttctccgagctcacccatgacggataaatgccagccgattccgagagcgacggccgcgtctccccgcgccagccgttcctgaaacagcaccatctcataaacggaaatgcctgcaccgccgaatgcctcaggtaccgttaacgccgtatatcccgcgtcgcgcagtctttgaattttctccgcgggaaaacggcccgcctcatcatcaagcgcggctgttttttgaaattcgtctgcaagcaggccgattttttccatccattcccgctgccgttcattctgtatccataaagacactggaatccccccattataattccgataaagttaataagtattatagagattcaagtctcgtttcgcaactgtgaggctgtacaaaaaaacgcgctattccatagaatagcgcgttcagactgcttccgggccgcggtcctgcttgagcccgagataaatcagcatatatgtgagataacccatcgtcatcacaagcccgccaaagaaaaagcttgaaaaaatcggctcttcaaacgcggtaaccgccgcaagcacgatccagcttgcatacaggtagatgatgaaataacggaatcccgtcttcattttatataagagaaacagccccactgtagaaaacaaacccagcgcaagcctgaaataaacaagatgttcgaattgaaacatgaatgacacaaaggaaaaaccaagcaataacacaatcggtaatgcggtaataaaatttctcaagtgagcacctccgtcattacctttattataaatcaaaatagcataaattattgatttatcgtgatctttttcacaaaaatgtcattcctttactttatacccgaatatcgcgtttgcaaaagctccaccaagcgacggctaagaagaatacgatatggataatgataatgcctgcggaaaataacggcgtcattcccgcaaacagcggcttcgccccgctcatatattgcgtcaggtcagtatttgcgaacagcagaaaactaccccatttgttttggaagagcgacataatcgtcacaagtgattttgcgccgtacagcacgataaatgacaaaatgacggccgttgcgctgtttcggaatacagaagaacacaacaagccaaagcatgccatcgcaaacgcctcgacccagttcgtgccgattactttcagggtgttcacaagaagcgtccctgattcagatgtcaccgacactccgaagaaagccatgccgaacagcagagacagaatatagtacgccgcatacaggtacaagctgaccaaaaatacggtaatgagtttagatacaaaaatccgctcccgctttaccgggcggattaacaaaaatttgatcgttttcttatcaaattcagcggaaatgatcgttgccgcgatcacgatcgttaatgcctcaagcagaatattcagcccgggggcgtacgccatatagccgatgaaattctcatccgttccggaactgatgacaagccgtttaatgacaagcgccataataaattggagaacggccatcagaatcagcgccactaatgagacttttcggttaaagagtttcatatgctcattcgctgtcaatttaaacattcgtcttcccctcctcttgaagcgccgtcgtcactttcatgaattcatcctccagcgattccgcatacggcatgatggaatacacgagaaagtcttgtccgacgagcgcacggtttaatgccgggatgtccttcttcgctacggtgacggtaatgctcccgccgtttttctccggaacgaattgctgctgggacagccattcgaaggcttcgtcagccggctgaatgtcgaggatggctttttcttctttttccgcagcgccgcgcagaacaacctctgttttgatctcacctttttgaatgatgatgacacggtcgcaaaggtcctccacttcacgcaataaatgcgtcgcaaaaaggatgctcgtcccttcaagctccgcgagttcctttaagtgatcgcggaaatccttcattccgccgggatcaagcccgtttgtcggttcatctaaaatgagcagattcggacggtgaagaatggcctgtgcaatcccgagacgctgacgcatgccaagggaatacgttttaactttgtcatgaacggcatttgtgagcccgacccgctcgatgacttcctgaagcctgtcttctgtgatgtttttgtgcatgttggcaaagtgcttcagattttcccaccccgtcaggtacgggtagaattcaggattttccacgatcgctccgacggattcaagcgctttttcgaaatcagcatcgtgctgaaagccgttaattgtaatcgtgccgctgtttttctttaaaaggccgacgatgattcggataagtgtggtttttcccgacccgttcggaccgagcaaaccgatgatctcgccctgcctgacatccatgctgatgttttttaaaatgtgctttttgcctattgttttgtcaaggccttcaatatgtaaaatcggctcagtcatacagccttcctcctttttcacaaaaaataaacagtgcccgtacataggcactgtctgcattataacattagtcatatattcgtgaagagccggagccgtcgttatgtcttatccgggaccggtccgtttttttccttctcctcattattgacgacatccagaatatcaagcaggaacacaaaaatcggaattccgataatcaagccccaaatgccgaagaaatgttctgagaaaatcagaaccgtaaaggtaaaaaagatcggcagttccgtttttgctgacatcagtttcggattaaggaagtacgtctcaatcgcatgaatgacgaaaatgaccagcacgatgtagatgacgtacgcagcgccgcccgtcgtatacgcgatgatgctgagcggaatgagcgaaatcaccacacccgccacgggaatgagcccgaggaaaaagaccatgatggacaggccgaacagctgcggaaaatgcagaatcgccaatgcgatcaaggtgaggatacagttcaccagcgcgataataaattgggcttcaagcactttgccgaatgttctcgcaaatttgctgccgaaataagcaagttcgtagtaaaaaacagacagcttgctgtgctgaaattttttcataaactccgtgagccgctttttctcgaacaggaaaaacatgctgagaatcagtgacatcacgacctgcaaaccgaaagtgctgatatcggccaagtatgtatacagtacattaaaaccttcttttacataggaaccgatattgatatcgccgaacacgctcgatatctcatcataaaacggaatgacatcgggatgatacgcgatgtgcttgatctgcttaatcagctgttcaatctgcttggcaacaatcgggtaaaagacaaagcctccgacagtcgccccgacagccagcgcaatatataaaatggtgatgaccaccctctggctgatccggaaaaaatggttcaacacgtgccggatgacagtctccagccgatccatcagaaaagtaaaaataaacgtaagcaaaatcaaattaatcatacttcggaatacaactaacaccccagtcaaaacaagaaaaacggaaaaacgtctgacacccggatgctgaaaaaatttaaaaatagccgccatttatacactcctgctaggacaaaaagcccttagatttcatctttcactctctaattgtaaattatataacaaaatgacgctaaggtctttgtccacctcctaataaatttaaacaaatttatcttttttactcatggcggccgaaaaaaagaacggcatgccggatgcatgccgttcctttccttttataccgccgtttttatttcttttacggcctgtgtgcttttcgcttcgtcaaactcattttcgctcttggctacgatgatggtggcgattccgtttccgatcaggttgacgatcgcccttccttcactcataaagcggtcaacgccgaggagcagcgccagtccctccagcggaataacctgaagcgccgataaagtggaggcgagcacgataaatccgcttccggttacacccgccgcgccttttgatgtcagcatcagcacgagaatgatcgtaacctgctggccgatggtaagatcaacgccgaacacctgcgccagaaaaaccgtcgccatggacagatagatcgaggtgccgtccaggttaaaagaatatcccgtcggaatgacaaggccgacaaccgatttggaacagccgtaacgttccattttatccatcatccgcggaaggacggactcagaagagcttgtgccgagaacgatgagcagttcatctttaataaaacggagatagttccacaagctgaaaccgaatagtttgcaaatgatattcaaagcgacaaatacaaacaggaacatcgtaacgtatacagacagcatcagactcgccagcggcttgatggaatcaaggccgaagtgcccgatcgtataggccatggccccgaatgcgccgatcggcgccgcgcgcatgatgtagccgatgattttgaaaaaaacgtgcgacagtttatcaaagaaatcaataatgcttttgcctctttcaccgagcgccgccaggccgacaccgaataaaacagaaaagaataagacctgaagaatgtcgccttttgcgaaagcgtcaaccatatttgacggaacgatgtgagtgataaattcaatccagtcaatcccctgtcccccgttttgggtgtactgagagacatcccctttttcaagcttgctgtaatcaaggccctcaccgggtttcatgatattgacgaccagaagcccgataataagggcgatggtggtcacgacttcaaaataaataaatgcttttcccccgactttgccgacttttttcatgtctcccatcttggcgatgccaagcacgatcgtcaggaatatgatcggtgcgataatcatttttaccgcattgataaatgtatcgccgagcggcttcatctgcttcccggcctcaggccaaacgagtccgacaatgacgccgatgatcaccgccgtgatgacctgcaccgtaagatttttgaaaattttcatccctactcccccttgcctctcgatgcgtctatacaaagatgatagcgttttcatacgaagaggggaagcttatgatcataacggacattttggtctttttggtctcggctagcggacgaatttgtagcggttaaccggccgtcccactcccccgtattgaatgtcgagcttaatctggccgtccttctcaagaaaatcaagataacgccgcgccgtcacccttgcgattccgagcgctttggcggcttcttcagctgaaagcggctccgtctgctgtttcatataggtcaaaatttcattcatcgtaaaatggtttaaccccttcggcagatcccgggacggattttgcggaattttcagcagcatgtcaagctgctcttgcgacatcgtgtcatgctcttcaattttccgtttatattgtttatagttttcgagcgcctgtctcatccgctccagcttaaacggcttcaaaatatagtcggccgcaccgttttgcagcataagctggattgtttctttgtcttttgcggccgagacgatgatgacgtccacttcgagcttttgttttctgatttcctggagcgttttaattccgtcttttttcggcatgtatacgtctaataccacgagcccgggccgcagatcttttataagcctgattccctcgtctccgtcagcggccgtggcgatgacgctgaaccctgaaacaccggtgataaattctttattcacctcctgcaccatcggatcatcttcaataagcagcaccttgatgtccatcgaatgattcctcccccttcatcggaaataatatagaaaatgccgttccctgtccctgccgtgtgtcgacttcaatcacgcccatccctttgtcgacgatttgtttgacgaggtacaagccgtatcccgttcctcccgttttattgacggtaaaccctttgtcataaaggcgcgggatatgctgatcggaaatcccgcttccgttgtcttctattaatatagcaagcacttcatcattttgctcgatactgatgtcaatatgtttgtcctccgtgtccgctgtttcgaatgcgccgaacgcattttcaattaaattgccgagcaggacgacgatgtcatgctggtcgacatgctccggaaatgccgagaaactgctgttttcatcaattttcacagaaatgccaagctcttttcctcttttgattttgcttaacagcagccccgccgcggcgtcattctgaatggcctgatgaagaaaatcagtgacgctttcttgttctgatgattccttaaaagcaagccggagcgctttttctgattttccgagctgaatcagccccgcgatggtgtgaagcttgttcatatgttcatgattttggactctgagcgcatcgacaaaatttttcacacctgtcagttcttccgccattttcgccgcttccgtcctgtcctgaaaaatggcgacggctccgatgaccttctttttcatgacaatcggaattctgctgctcatgatcacctttccgctgacttggatttcttcattatatacggctcggttccgctcgacgatttcagggagccgcgaatcttttaacacgtcccagatcagcctgccgtcggtctcttgtctgacattgaatatctgcttcgctttttcattaaaaatggtgatgtgatgctgattatcgatcgcaatgacgccctcattcatcgagtgaaacgtagcggtccgttcctcatacattctcacgatctcatggggctcgagccaaaacatttgttttttgatgtggcgggccagcaaaaaggagccggccagtccgaacccgagcgccagcagaacgataaacagtatttcatgtttcagctgaagaagaatttcaccgaatccgggcagcgttttaccggcaaggacgacgccgatctgattcaaatcccggtctttgatgggataaaaagcgcggacggcggtgccgatctctccctttgcttcggaaaaataaatgtgctcggcgaacgccgcggcttcgtcctcaccccttgaacgctttccgatcattgtgctgacgggatgtgaatagcggatatgatccatatccatgacgacgatgtagtccgcttcattgatgatccttatttcttcgaccgcatggcgcacgtcttccctttgttttttctgctccagggcgcgtttgacatcggtcatctcagataccgtccgcgcggtattcatcagccgttttttcagctcgcgctcctctgtatgctggatattgccgaccagcacgatgccgacgatcaaaaaggtaaaaagcacgacgatataagaaagtatggtgattttccagcggatggtaagcttttttttcgtcattggcctcttcctttccgtctctttacgaaaacggcccgcccgattatgcttgttatagaaaatggcggagggggttttcgatgaaaagcttgctgacttgtctcagcctgatggtactcggtatcggaaccgctttattcatcggctttcatgatcgtttctcaacagaagaaccgtattatgatgacgaacaggaaggcctgaaagatcaaatggttttcaaattcagtcatgtcgtggctgaaaacacacctaaagggcgggcggcgaataaatttgccgacctggtctatcaaaagtccggcggtaccattaaagtagaggtatttccaaacgggagcctctattcagataatgaagaaataaacgccctccaaaacggggacgtgcaattcatcgctccctccacctcaaagctcggatcactgtctcccgaatggggtgttttggatctgccgtacgcgtttacaaactataaagccgtgcaagaaggcctcaacggcaaaatcggcacgcgcctgttcgcttctttagaaaagcatcatttgaaaggactggcgtactggacgaacgggtttaagcagctcacgtcaaataaagggccgatcttctctccggacgatttgaaaggacaggcgctcaggatcatgccgagcagcgtgatcgaagaccagtaccgcctgctcagcgcgcacccgcggcaggattcctttaattccacgtttcagctcttggaaagcaatctcgtagacggagaggaaaatacgatttcaaatatctattctaaaaaattttataatgttcaagattatttgacaatcagcaatcacgggtacctcggttatgccgtgatgaccgacgagcatttctggaattcacagacagaaaaaacgagaaccatcttaacggaggcgatgagagaaacgacggaatggaacgaagcctccgctgagaaaatgaataaagaccagcttgaagagataaagaagaattcatccattcatattcatgtgctgagcaaagcggaaaagaacacatggatgaaacgcctcgacccgatttacggacaatatgaacaggtgatcggccgcgggcttgtgcaggatttgttatccttgcgccgcgagccttagcaggaccaatacgcccatctccgtttcatcccttttcccgccggggaagtaaatagggacagagcaaaaaaggagatggagacatgtttacacatacgaaaaaactgcagcatccggctaaaccggatcgtcctgacccgctgttcgcaaaaaagatgcaggaaattttagggggacaatacggggaaatatccgtcgccatgcaatatttgttccaaggatggaatacacgaggcaatgaaaaatataaggatcttctgatggataccgcgacggaagaaatcggccatgtcgaaatgatcgcgacgatgattgcgagactgttagaagacgccccgctggcagagcaggaaaaagcggctgatgatccggtcatcgggtccattttaggcgggatgaacccgcatcatgccattgtctcaggactcggcgcaatgccggagagcagcacgggcgttccgtggagcgcaggctatatcgtcgcaagcggaaaccttctggcagacttccgcgccaatctgaacgccgaatcacaaggaaggcttcaagtcgcacgcctgtatgaaatgaccgatgataaaggcgtgaaagatatgctcagctttttattggcccgcgataccatgcatcaaaaccaatggcttgcggccattaaagaattagaagaacaggaaggtccgatcgttccttccacattcccgaaggcgctggaaaaacagtcattctcccataagcttattcatttctcagatggagcagaaagcgctgaacaaaattggctgaaggaaacagcgccggacggagaaccatttgaatacgaaaaggaaccgaaagcgcacggcgaaatagctaagctggaccccgtcccgccgtatgtccacaacacgcttcccggacgaaaataaaaaagcctctaaaggggctttttttatgtgcgcacaactgtccagtccggttcgtaccggatgtcggggtgatgtaacagctcgtgaatgacaggttcatccccctcgtacagcatcacttctattgaaagaatcgcagccttctgctcgttttcttcgtatatgcggtcatgttcgttctccataaaatcatcataggcctgtctgtcctcccaaacgctgatgatctctgcgatgaacaggccgtctgcgtttttccgccagccgcctgcctgtctgacgaagccatttacacatgataatgctccccaccttgactgtgcttgcgcaaatgcttcagcgtttgcagcgtctgtttcacatacaatctttttgatcagcatgaccgttcctctgtgatgactgttttcgcatgcgtatgctcgacacagagattcacggttctgacgtaagagcgggtgcggtgaatcgtgcctttcgggatgagcaggctgtcatttgctttgagcactgcggtttctttgtccttaaaatcgatcagcagctcaccttccagaacgatgaaccattcatctgagtcagggtgatggtgccagtcatattctcccgtaaacactgcgaggcgcacacagtggtcattgatctccgcgattgaaaaattgtcgtgtttttctttgactttatggcgatagcgagcaaattcagcatgtcagacacgagtgaaaaacccctttttcattttattgtatcggttttgcggctcagatcaagattttcccaaaatcaaaagcgatccggctgatgtgccggatcgcttttgatctgcaggttgtctgccttttatgcttttattagctgcttcgtctgtttccgcctttttggccgatttctttataaaactctttgtcatgatttttacttgtagcttctccgcctttttggccgatttcctgatagaattccttgtcatggttattgcttgtggcttctccgcctttttcaccgatttcctgatagaattctttgtcgtgatttttgcttgtggcttctccgcctttttcaccgatttcctgatagaattctttgtcgtgatttttgcttgtggcttctccgcctttttgaccaatttcctgatagaattctttgtcatggttattgcttgtagcttctccgccttttttacctgcttcttctctgctcattttgttattatcttgtgccatttttgaattcctcctttaattggtgttggttgttggtttcccgatttcagaactgataaacaaagaaaacacattgaatgtgttttcgggtggttttttatcattctgtatcgttcatgcgttttagaatccggcgttttttataaagcatgatgcctgtttccgcgatgctttctaaagctgaacggttggcggacgcgccgaagatgatgcctgcggccggaaccatttgcagcagttttttcgcggcgaacgtatcgcggtagctgtaaacgacttcccgccagccttggatttgcgaggcgacgcgctgataggtttggtcgttttgatcatattgccgtaaatcttgcaggatcgctttttttccgatgacgtcactggatgcaagctgaagcaatttgacgataaacacgcgttcttttttgtctttcggatcaaagccgtaagcaaccgcgatatcttgcagcgtctttaaggacaggccgagcatcgccggaatgtctgccgcaagcgtaaacacgccgccgactcccgttgcggctccctgcaccgtcgcggcctttacgcttgtacgcgctatggcttctgcgatttcgtccatgacggcaagcggcgcattgcggatgtcgtgaagcgtttgacatgtaccgtgcggcagccgtttttgaaactttttcatgatgcgcttttctgatgtaaggtactgtccgcctgactgaataaacgttcccgtttcatcgagaatgagtccgattttcctctgaataaattgcggtgtcagcttgtccaaaagctgaaacggcaagcgggtgaatgtttgccagaacatcgccctctgctgcgccttttcccatttttgaatgtctctcagttgtctttccaggtctgtccgctcttctgtcacccgtcctgcacgtcctttctgatttctttctacatagtatacctttatggcgttttctttttacacccggccggactttttatccggaaaacattccattgattaattttcttcaaattctatatattttataattttgaataatacgattgaaggagaatgctgtatgcaatggatttatttaagtttagcgatcatttttgaagtattgggtacgatcagcatgaaattatcaaatggatttacaaaacttgttccaagtattttattgttattgttttatatcggcagcctttgttttcttactttgactttgaaatatataagtgtctccatcgcgtatgcggtctggtcgggaatggggatcgtactgatttccgcgatcggaatttttttctttcatgaacagttctctgttataaaagctgtctctgttcttctgatcatcatcggtgtcgtttccttaaactttatttccgaaagtgaaacgtcatcaaacggcatcagcgttcatacggacagaaacaggtgatgaaagggttaaaggttctcttcctcattacagatattggatttatcatttattggattgttactttttttgagtagattccaaaaaacatggcgtttaaagattatgataacgccatgataatggcctggaactggtcattctttcccctagatattttcatttcattgaccgggctgtacagcttgtttctttataaacggaaacattcgttatggcgccatttcgcattaatatcacttgtgctgaccttttgttcaggcctgcaagcgattgccttttgggtatttatcggtgattttgatctcatgtggtgggcattcaatctgtacttgcttctttatcctttatattttattcggaaattgctggtctctcgtaaaaatagctgtcattctttttgatgaggcggttttctttttcttcaggcgggaaacacttttcataaaggagtgatagacatgccttggtctatgaaggattatccgcaatcattgaagaatctcgaggaacctgtgaagaaaaaagcgatcgaaatcgcgaatgcgatggtagatgagggttatgaagaaggacgggctattcccattgcgacaagtcaggcgaaagagtggaaaaaaaacgcttctaaagaagaaatcgatcagctgatgaaacacgatgatgaaacgaaacgcggaaattgaatcggaatatagaaaaaccccgctctcaagagaacgaggtttttctgcttataaaccgtaataataagatagtgtggtgactgaaacgtagcctgtcgctcctgcatacgtgactttcagccatttattggaattggtgtagtggccttgaacatattctccggtgacccaagaacctgtaatttttttaccgcttgagaatgttgtgatcgttgaacagctgaccttagagcatgagcgcatattagcaccgtaaataccgactgtgcccccgctggctaaaatggaaacgtccggttcagctttaggtttgaaagctgctgctgatgcagagccgccaaaagcgaataaagaaacagcaaaaatcatggctaaagaaatgatcgacaaacgacgtaccaagaaaattccccctcttttatcatatggccggaaagctttcctgacgttattatacttttttgcccggaagactgaaataagtctaatgctccaacttcttttcttcgcaagtgaccatgccgattctttttttgatagataacagccgtttattggactggaatcactgatatatcgttgattcaaacgtttattcagagcggccggagtttttccggaggtcatttgaatggtacagaaaggttttatcttccaatggaaagaaacattattattctatttacccgggaaacggaggaaatactgcgtctttttctcaggatcagttgcaccggacagaaagttgtgaagtgatatgagcaagtgttctcttttcacctttttaaaagaacgctcaacgcatccgcgcatgatcggacgcggaaacatgctttgcgaacggcatcgcttctttcccggaacgatgccgttttcattttcggacctttcttcggcgggatacatatcatagataaaacagggcatcaatgtaccggtttattgaacataaagaacttgacatctcataaaagcggatttatgatgtagataaaataatttgcatctaggaaactttttgttatttagctaaaaatctatcggaatttaggtgagacataatgagcaaagacatctcagcacaatcactgcaagcaaaagccgtgcaggatgcacttgacggcaaaagcaagggattcaagcggcttctgcctttcttaggcccagcctttatcgcggcgattgcctacattgatccgggaaacttcgctacgaatatctcagctggttcgaaatttgggtatatgctgctgtgggtcatcctcttttcaaacttgatggcttttttaatccaagttctttccgcgaagctcggcattgccacgggtaaaaaccttccggaaatcgccagagaccggtatccgaaatgggtatccgccgggctgtggatacagggtgaactggtgattatggcaactgacctggcagaatttatcggggcggcgctcgggctcaacctgctgttcggcataccgatggttgaagcggccattatcgcggcgatcggatcattcgcgattttagagctgcagcgccggggttaccgggcgctggaagcgggcatcgccggacttctgtttgtcgtggtgatcgccttcgctctgcagaccttctttgccaaacctgacgccggctctgttctcgaagggctgtttatcccgaaaattgacggaatggacagtgtgctcttggcaaccgggatactcggcgcaaccgtgatgccgcatgccatttacttacattccgcactgacacagcgccgtgtcgtcggaaaaacggataatgagcggaaaaagatttttagattcgagacgattgacattctcatcgcgatggtgatcgccggggcgattaacgcaagcatgctcatcgtcgccgccgcgcttttcttcaagaacgggctgtatgtagaagatttagacgtggcttatcagcaattcggccactatatcggaccggcttcagccattctcttcgggatcgggctgctggccgcagggctttcaagctcttctgtcggcacattgtcaggcgatattatcatgcagggcttcatccgttaccgtatcccgctttatttgcggcgtttcattaccatcattccgccgatgatcatcattatctcgggggtcaacgccacagaagcgctcgtatggagccaggtcgttctttcattcggcatctcctttgcgctcgtgccgctgattatgtttacaagcaacaaacgcctgatgggcgccctgacgaaccgaaaatgggtgacggctctcgcctggctgattgcggttttggtgatcgcgcttaatctgtttgtgatctacgattcattccgttagaaaaaaaccggccgtagcggccggtttttcttttgacgccggatgccgttcgtatctttttccgggcgtttttggtatgatagaagaaaaatcggagttttgcttatgtcagtatttatccttttttatctgtggattgtgccgattgtcatcggtatcttctgttctctttttgcttatcggacaacgggtaagaaacgtctgattcccggctttgtgatgatcgcattaagtatcgtttccttaatcacggggctttggatcggcggggtgaactatcatgtgttcatcggaggcatgtttttattcggtacgtttttggccggttccgccttcccgtttttcttcgctctctcacgcaaacgaaaataaacaggcatgccgcctgtttattttttttacctaagcctgcattataaaaaccgctccgataatgtgattccgcctcaatcagcctatacatgcaggctccagcccatgttcatttcacgaaactgcagctaaaataaatcctgccaaaaaaaaattttgaattgcgagaaaaatatcgtattaaaatcctatttacccaaaaaatacctattgatagaatggtatctgagagggaaaaatgttcaaagcggatcatacaggtcccgcctaaatacatagtctttcatttctctctacactacatttctaaaggaggatttcccattagacacgcagctaaaggcattctgtttgccgcatctttagcccttgtaactactgcttttgtccccgcatccttagctaaagaaaatcatcataatactgccaatgccactggaacgacaaaatcatttttttatcagactgatacgcaattttcctacggacttaaagcacaaagcgatgcatctgtgtcaaaaccagtcaaagatgtaatcagagaagtgctgaaaaataaaacaaaattattcaatcttgttgaaaaattagcaggaaagaaaataagaaatgaactcgaatccgttttcaatgaacacatcgaaccggttttaaagaaaatgctgaacgagtatgtcgccttaagctggactgacgtggaaaagaatctttatctttcacttaaaaagtccggactttctgacagccaggctaaaaacctcgctcatttgacaactttagcaatgaaagcattttaaaatcattcataaatgatcgtcaggaaaatacgtataaagtaatgcaaagtgctgttagattcactctaatagcactttttcattggagatgtcacatgactgtcttttttactgttttgctcactttcttatgctgccttgtgatttcatctcttatttttatgattctattaaaaaaagagatcgtggatacaccgccaaaccgcttagctcatgcagcattcatcatacttattggattctccctgttcttcgctgtgactgtccccagcctgattatttgttttgcagctgtaacaatacatcattttttcggagagtatatcatctatggttcactttcagacttatacatattttctgtcgtcgtcagtatcttagctttagtttatatgctaatccttacggcaattgtaaaaggaatgactcatgtttttacattacctgcttggtcagcctatatccttgaattcatttttgcatgggctgctgtttacttctcaatccaatacgtttccaatcatatcattgagaacatatctatatttcaaggtggagaaattcttctttcattgttcatcactttcttattttcgggattggatatcctttttactaatttggataagatcacaaaagagaaattaggctaagggggtaacaaatatgaggatcatgacatatatatcttatttttctatttctttagttttgcaggtggtatggctgctattaataaaagatactcctaatatatttctgatagatatgattacggtgtccttcttattcactctctttatgttcatcttggatcaaatgttcaaaaaaaagcggacaaattagggtctgtttttaataatcctcgggcttctctttcgttttgaaattgttccggatctggggatgttgcggcgaaccgttcattaatgtttaacaccagcctcggtaaaatacttctccttttatataacatcctgacttttccgtcatatattcaaacgaaaaaacggcaaaaaggagtaatgaaacatgatattgtttattggcaagttcatgttgctctttttattctgttcgctggcatattatttgtttaaagttgtttattacaatatagggaagaacattgcgcttaaaactccgaaagggacaaagacgaaccggacggcacatgtgtttgtcaaaaatggaactaaactgaatgatggagattactttatgatcgctgttgtgaccgctctctggctgttcttcagatgaaaccgcgctgatccatcacgagttttttgatcagccatcgctcgccagctgccgattttcacaatcatcgttttcgtttaggacgactatatgcaagcaagccgctcaacaaacaaaggagctgtcgagatcttctcgatagctcttttgtttgtccttgaatgattgaagataggcttaaaaatggacggcgtctttctcatgcatgcatcgttcaagaaaacacttcacagcaaaacggaaaggtgaacgcaatacaagtaacggttaagaaccttatgaggcagcgtatgttgattactggataagaaaaagaaatcccccagtcttaaaaggtggaggtcaaaaattggagaacacttaaatatttatagctttttcagcgatataaaaagttccagagtcactcatttcagcagtataaacatttgtcacacttaataatccagtaaaaagaataccgattaaagcggagctgattataagtttcttcattatatagcctccgtaaccttaagtatttgtgtttgggcatgtatggttttctttaaaaagtttcttccctctgcatagtttctcttctcaaaatgaaagtcacctaatttttcggttagctctgcgaaatcagaccaaaggcgtttctcttccaagtaacctaagctttgtttcacttctgtttcattatattcttcgtacaatgaattaatgatttttaatttagccaaatattcctcttcattagaagtccgagcacgatttaaagccgtttcataaaagaaacgtgcttccttggctttatcacattggtacaggacattcgccatcatatataatgatctcactccatacactgtatcaatatgttctttcacgtctattgcctttttgaaattctcttcagcagcaatcaaatttttccctcttaaataaactaagcctgagttatgaaagatcactccgataattcttttcactttttcctcatccaagccacgggcgttacttaatgcttcccgataatatgattctgcctccgtcagcctgtacatatcgtacatgttagcaccgaccatcatattacagccaatcactttcactttgtataattgatttttttcaaacaattgcttggctttttttaaatgattgagggaaacaaagtgctgatcaatttgataataggcatcagctattttgtaatgaaattcagcttgctccatttcatctgatacagcattcaactctctctctgctttgcgataatagcttatcgcatcaacatactctttatgatcaaattcatacattccacgaaaaaataatgagtaatacttcaagaggcctgtaagtcttttttgcggcttttctattttttcaagtagttcgtcgactgtggggcgatctcgatatctgtcttccggctccaaggaatctaacatcaattggtgacgaaagcacatcaatgaataaaaaacaagcaaatcctgatcctcttccatctcctctatttcctgttcgacctcagcctttaaaatctcagcatcaggcacactgaactggcgaatcattttgtaccattcattgatcttgacaccaacttgggacgacggtaaaacttgatccatatatacctctccctctaattgctatttttgtaatattataactatttgaacataaagtgaaaacgaaaaaaaaccgcaatttacttttgcgtcatactcacctgattaacttgttttaagacacagggaaattatacctcaacataaaaatactgtataaaaatactatttacccaaaaaatacctattgatagaatggtttctgaaggaggtggaaaaatattcaaagagaataatataggactatcctaaatacatagtctttcatttcgctggcagattacattcctaaaggaggatttttcattaaacacgtagctaacggtattctattcgccacatctttagcccttgtaactgcttcttttgtccccacatcctgagctgaagaaaaccgagataccactactaatgccactggaattaccaaaccaattttttataataattgataagccgttttccttttagcttaaactggttttaaagaagctattaaacgaatatgttgccttgagttgtattgacgtggagagaatctttatctttcacttaaaaagtctggactttctgacaaggctaaaagcctcgctcattggacaacgttagcgatgaaacattttattgttattcataaattattaggaggaaaatatatatgaagaagaaagtaatccctgtagttttaagcgcaactctacttacatcattcttgggtacttcaggtgctttagcagctgaaaacagaaccacaactcctgtaccggtaacgaaaactgcaccaggtactattccaactggaatgcctggcactattccaaccaaagcggctctcaatggtgactaccaaacccaaggtgtagtttcgtggtcctataaggctttcagagctgcctgccgttcaggtggatggcttttatcaaaagccttaaagccattctcccctaaagctgcggcatggattagaaaaaactctaagaaggttgccgacattatggataaaggtgaaaattggggtgtaaaacaatttacaaaagcttttaaagctatcggagctcctacagatgtagctaccactttagctaaattcattgttgctttgatttaacatatttaaaatttaaagtgctgttagattcactctaatagcactttttcattggaggttaacatggctatctttattaccgtattgctcaccatactatgctgtcttgttatttcatctcttatttttatgattctattaaaaaaggagattgtggatacaccacccaaccacttagctcatatagcattcatagggcttattggattctccctgttcttcgctataactgtacctagcctaggtatttattttgtagctataactgtaaatcattttttcggagagtatatcatctatggttcactttcagacttatacatattttctgttgtcgtaagtattttagctttaatttatatgctaatccttatggcaattgtaaaaggaattactcatatttttaaattacctgcttggttagcctatatacttgaattcatttttgcatgggctgctgtttacttctcaattaaatatgtttccagtaatttcattgaaaacatatctatatttcaaggtggagaaattcttctttcattcttcataactttcttattttcgggcctggatatactttttactaatttggataagatctcaaaagagaaattaggctaataaaaagaaaagcaggcaatttagagcctgcttttttattccctttttaacatttctccaagccttgctttcgttttcggcccgtaaatgccgtcagcaggcagtccatacatggactggaaccgtttgactgcatttgctgtcttcggtccgtaatagccatctattccgttgttctttgcccctttgtccggataataatagagagccgccaaagctgtctggatctgtttcacggccgttcccttagttaaggggcttgtcactttaaaaacgcccgatggcagcgtgtaagatgattttttgccttttgttggagagctggccgagtccgtcagctttaatacttggccgactttgataaaattcgggcccttgatactgttcaatctctggatggtggccatgtttacggcagttttctgtgcaattacagggaggacatctcccttcttgacggtgtacgtcgccacgccagtctttgttcctgtttttgctgataagggctgtgcgatgctaatgagcgaaccacgtttgttatgaactgtcctggccctccaaaagcttttttatcagccatcgcttgctagctgcagattttacgattttctttaccgtttccgcagattttaatacgatatactttcggttacggttcccgtcctctaagcttccaagcgggtcaaactgctgaccacttccttaccatggaagggggtcagtaaagaaataatcatcaataagaaagcctaaaaaaattaacaggcatgctgcctgttaatttttttataaccaccggcttcttaaaacagccgttttaagcttttcttgagtgacggcatttcgattttttggttttcaaagaagtttttcagcatgtatttgctgaagcccttcgcttggccgtaagtgatttttcccggaagcggcggctcgtcgccgatgacggcgtcgatgacgaccggctcatttgagttgagcgcttcatgaaaagcgggagccaattcctcgtgtttcgtcactttgatgccttttgccccgcagctttctgcaaaggcggcgtaatccatattttgcagctgggtgacgtagtcaatgttgcctttgacccgctgttcatattcaatcatgcctaaattttcgttgtttaatatgacaaccgtaatcggcagtttatatttaacagccgtcggcagatcctgcatcaccattgaaaatccgccgtctccgcaaatggcgatggactgccgatcaggttcggcaaggcttgcggcaatcgctcccggaagcccgcatcccattgtggcgagccagcttgagacgataaagtcctgcttcttcattttaaaatggcgggccatccacactgtaaccgttccgacatccactgacaggacggcgtcctctgcggccgcatcctgaagccgggcaatgacctgctgcggcttgagcggatgagtcgcttcggtttcatccttttcgatttccttccaccaatgcttcatgtgctcggtgcaggcgtccaaaaatcttctgtcttctttatattcaatgtattccgtcagctctttcagccccagagccgcatcactgacgattcccgcattgacgggatagcgcttgccgattttcgccggatccgaatcaagctgaatggcgggcgtatcatccgggagataatccctgtacgggaacgatgtgccgagcatgatcagcagatcgcattcctccatggcttcgtaggcgggctttgtgccgatttgcccgagattcccgagaaagtggggatggctgtcaggcacgacgccttttgccggaagagtaatcacaatcggagcggccgctttatcggcgaatgcgagcagctcctcttttgccgattttaacccttggccggcaagaatgaccggtttttttgcgttgttaatatattgcgcgcatgtgacgagatgttcttttttcggctctatatcggctttgaggtatatcggcgatgtgtaaaccggctcccgtttgattttttgcgcgaataaatcatcagaaacggttaaaacggcaacgccttttttgctgtaagccgtgcggatcgcctgattcagaagatcgggcagcgcttctgccgtatgtacctgctggttgaataccgccacgtcctcaaacatctgctctaatttgatttcctgaaagctgtcacggccgatttcatcggaagccacctgtcccgcaatcgccagcaccggaacgccgtccgctttggcgtcgtataaaccgttcagcagatgaacggcccccggtcctgcgattgaaaggcagacaccgatctgcccggtcagttttgcctcagccgcggcagccagggctgcgacttcttcgtgccgggtttggatgaatgtcaggttatttcgttcatgtctcagttcttcgataaattcattaatgctgtctccgggaatgccgtatatatgaccgactccccattgttcaagcagctccgtcattacgtgtcctgctgttttacttggcatactgcatcctccttttacctgtattcatcccctttttcatacgggttgaaacacgggctatactctcagcttttttctcagcagatcaaggatggataacagatttcggtctttaaggactgccttacgatttgccgccccattgagtccgtcttttatttgccgttttctgttcggcaccatgaacagcggcagccggttttgggaaaaccagcgtaaatcggcggtttccgatccgttcatcagcggtgttcctccggtaatggctccgatgaaaacgtgctgtgtatcttcaaatgccggcctttcatactcaccggatttttgcaggatggtcacgttataccctgtttcttcaaaggcctctctgacggctgcggcttcagatgtttcaccttcttcaatcccgcccccgggcaaatcccatagtggaacgtcttttcgttttacgagcaatatgtcccgcccatcattttgtatgatgacaaaagcgccttgtgccatgtcgtcctcctttacaaaaaagaccgcggcatttcagcctgcggtctttccgttactttttaaaatgatacggcagggtggcgacgatgatgtccttcttccaaaacagccggacgcggagcaagaaggctgattggttgtgaaggatggtctgccagcgttttttcgtaataaattgcggaaacagcaccatcacggagaactgttcttttttcgctttttgttcgaccgtttccaaaaacttatcaaacgggtgaaccagactgcggtatgaggaatgcagggtgacgaggcggacgccgttatgaagctcttcccagcgcttttccacctttttttcgtgttctctgtcaaaggaaacatgaaccgcaatgacctgatccgataatgatttcgcatactgaatcgatttttggacgacggtggtgacaccggcgacaggcacgatgacgacggttcccttgatttcctcaggctgctgatcaacgacccgcagctgttcgccgaccgcggtgtagtgatttttaatgacgaaaaacagcatgacgacagcaggcatgaataacagcaccggccagacaagattgaacttcgtcgcgaataaaatacacagcaccataaatgaaatggcggcgccgcatgagttgatcagcatttttaccgcccagcccttcggcttctgcctgatccacttgatgcacattcccgtctgcgacagcgtaaacggaatgaacacgccgacggcataaagcggaattaaatgttccgtgcggccgccgaataaaagaatgagcaggatggacgcgataccgagaaagatgattccgtttgaaaatcctaatcggtcgcctcgtaccgtaaacattctcggcatatactgatcgcgcgctaaattaaacgccagctgcggaaaagcggaaaagcccgtatttgccgcaagcacaagaatcagggatgtcacgccttgaatgaaatagtacaccgtatggcgtccgaaggtttccgcggcgatttgtgaaataacggtctcgttaggcttcggacccgtgccgtagccgtacgccagcaccgtaatccccgtaaataagatcgccagcagaatccccatcatggccaaagtgcgggccgcgtttttcgccggaggatttttaaaggccgggatcgcgtttgaaatggcttccacaccggtcagtgccgagcagccggatgaaaaggccttcagcagcaaaaacagcgtgatgcccgctacgggcgtgccgatcggtgtatgctcggccggatgaacctggcccgtcatgagcttaaacagaccgacgacgatcaaaaggacaagcgccgccacaaacagatagacgggatacgccaaaatggacgccgattctgacagccctctcaaatttaaaatcataatcagaatcacaagcaaaacagcaatgagcaaatgatacgggtgcagggccggaaatgccgatgtaatcgcgtcagttccggcagaaatgcttaccgccaccgtcagaatataatcaacaagcaatgagccgcccgcaatcaggccgggcttctcaccaagattttctttagaaaccatataagcgcctccgccttgcggataagcgtaaataatctgtctgtaggacagaatcaaagcaagcagcaaaatgagaacacccgctgcgatcggaatggaataccaaaacgcggccgcgcttaccgcagccaaaatgatcagaatctgttccgttccgtaagcaactgatgacagcgcgtctgaagaaagcatggcgagcgccttgagtttcgtgagtttctgctctccggccgcctgtgatttcagcggtttcccaatcaaaaatcttttgattgaatggtacattttttgtcttcccctttttttcattttccgtttgatttacaaacccttactgctatgatgtctctgaataacgattgcatgccatatttcggcacagcaaaaagacacagaggcaaacggatgcccctgcgccataatcgtgcacaggtttcattcatctcctctcatgaacgcttacgaggttagctgtcggattcgggctgatgagagttggccctacctgaaaaaggattcaccccaagcggcatgacgcgccgcaaattggttcccccgctctgattacagattaagcgatatagattataaaagagatcatactcccgtcccgttcagttgtaaaggggcttttatgctgtttcaaaaataaaaaaatcaccgccaaaaatggaaataaaaatacaaaaaaagaggcctgttaacggcctctttttccttcattactcttcacttttttcattatccgcttttcttttttccttcttgccgtcagccagatcagaccggccgcaataattataagcgccgcgaaaacagcgatatacgtgacgttcagtgctgcggaacggcttttcgtatcaggcgccggactgctgtcgtcggatttgatttgctgatggtttgaaaacagctgcttgccggccgtttcgttgacgacggttgcggcatcgcttgtgctgtctaaaaagctgatcagctcttttgtgacagacgcgccgctgcctgataacggagcaaaaacagcgatgcttcggccggagtcccaaggtgattcctgggtaaacgcgacttgtttcgttgtctcattcagcatctgaaacgaagaaacatcgtacgcgccgctgcggtctgacggcacgagaagcttagaggcgtttgatttcaaaagcggaatttgcggcaggcctccgataaacacaacattccggcctttggcatccgcttccttcatgtctgatgccgtctttacggtaaagccgtttccgaatgaatccgccaccagagaaagttctttcagtgtctgtatgtttacgtcatccgggatgacgatcactgttttctctttcacgccgcccgcaaacgggagcggccattgcccgaaatccgctttctgcgccgcatcacttaccggatacgtcagcatgctgcttttatcaatatagacccatttattttcgtcacggtcaatacacgggttgttatgtttcaaacctgatgtgacaaattgcagatcaatgtacctgctgcttcgcaaaagcttcggatcaatcgggattgagacgtggtaaaagccatctttatcttgattgccgagatcatcaaggcgcaccgcattcggctgtccgttgatcatgacgttcagctccgctctctcggcgtcattagctgaatccgccttcgtccggatcgattccgacgtctttaatgtaagtgaaagcttgaccttaccgtctttatcaacagcggccgccgcagggtaaaagaagtgctctgacgccgttttgtttgatccgaccgttacatttcccgcgccgaagtcctctaatgtcagtttattgcctgtcttttccgcagcgggctgaaggcggccgattgtcaaagtatctccgcccagctggcttgaataagcgctgtctgtgatgacgcggattttatccgccagcgttttgtctgagtgcgccgtgacaaacaggacgggctgccgtttgtcccctgatgtcagaacccgttcggcgagaaggagtttgttgtcttccgctttgaagttcccccgttcgaaaagctcttttattttcccgttccaatgctgatcagcgccgatgacaattgacggattgctgattttgccggcatcggattcttttacataggataccttcagcctgctgtctgccgttttcagaaatccttctgttttgactgcggcttcagcttccgccgaggtcggtttgtcaggaaggataatatcggtttcttcacccgtattgcctgattgggcaaacggatacgggaaatggccgagatccgctccctttgacttgcttgcttctgaaagcacaaggcggctgtccggataaatttttatccagttgcctgacgtatcctgcctgacgcagacgccctcttttaatacgccgtaaaatcgtaatgatacattgtgatagccttgggcggattggcttttgctgagattgagcttcaccgttttccgcttggagctgccgtcaagctttatggatttgacgggttcatcatcaatggcgatggttaaagaagacggggcaattaataagtttgacgcctcgtaatcaatcagaagcgactgatcggcattcgaagctcccgcaggaatctgataggtcagctctgagctgtctttcgccccgtacagtgtcatcagatcgccagtcagcgcctgctgctcttttgcgccggcgcttgttccgagagcggaaccgtccgttttcagctcccgggccgcggccgcctgcccgttatacatcaatagcaaaaggccagttatcaatatcgcttttttcaaaaaggtcacccgcttttattttgattgtatcgctccgttttgtaccacttgacttcctgcttgaacaatcggtgcttgatctctgtgaataatgaccagatgacgagcacgatccaagcctgagagtatgtaaagtacatcagaaatacgataaagaagttttgtttgttcatttctgttttttcaatgcttaaagtaatcatgacctcagtcataaacaggaaaaaggccagtatccacaaaatcatcgccaaaaacccgactgtcagatgcaggtcgtaaaaaagattgatgataaaaatcgtgtttgacatgatcacaccgaagaaaaacaaaaaatacgtaaaaaagaaataaaacagatcgaagatgatccgcttgcgtttcagcttgaaaaattgggataaaaacttaagaacgacgtactggttgccgcgcgcccatcttgtccgctgacgccaccagaccttccatgtctcaggctcctgctcccatgtcacagccgccgggaaaaagcggatatgatagccgagattatacacgcggatggtcagctcggtatcctccgccagcgccttatcatcccagccgccgagctgttcgataatgctccgcctgatcgcgaagttcgttcccgggatggtggcgattttgaaccatttccatctgccgccctgcgccatccactgaaaacagatggtttcaatattgataaacttcgtcaggatcgttttcgccgcattgataacacggaatttcccgacaaccgctcccgctttctcatcattcatcagaccgagaaccaggtagtacaccgccattttttccggcgtattgtccgcatcatacacgcagatcacgtctccgttcgattccgcgaaccctgagttcagcgccgaagattttccttttccggcgttcgggggctttgtgatgaccattttaatgaagtcatactgacgggaaaattcattgacgatgtctcccgtccggtcggaggaattatcattaacgacaatgatctcaagcctgtctttcggataatacaggttcaccatcgccttcagcgtctgcctgatgacgacctcctcgttatgcgcggggatgagcacgctgaccttcgggagctcccccatctttgcgcgccatttcggaatgttccgttcgaaggtcatataatgcctgaatccgccctgcatcagaaacatgtgatagagaagcatcacccatattaaacttaatgagataaaaaacagaatgttactcaaggcttcttctctccttaaagattcgtttttttaatgtggcgcgcaaataaaggacgtagcaggcgaacatgatgataaacaataacaccacgccggagagaatccaaagcgctttttcaagaggcgtctgctggtgatgattgaaaaaggccgttaccggatgaatcttgttttccacatgaatggttccgtctccgtccgttttgatcctgacgctgtccgacgttaccgtttgcttcgttttcttcagatcgagccactcgccgccgggaatccgctccatctgattgacgagctcgggaaggtatttcatgccgagatacggatggtagaaaccgcccgccgttccgccgccgaaatcaatcatctgagaaatatgattctccatatctccgagcggattttcctttgagttatcggcataaccgattgtttcagggtacagcgtcatcccgtccagcatagccggctttgagacgaacggaggggcgcccgaggttttccacgtcgcgccgctgagctgcacttgtccgaaaatgctggagaaataagaagatgcgattttgtagccttcttcagacatcgtgtagtgcggcgcttcgaatgacagcgggtaaaggccgagctctgtcagatcgtcaatcgcctgctccagcttcgttctcgtgtagatgttttctttttcacggaaaggcttcacatacgcccggtacgctttttcattcggaaaatcctgttccttttcaagcttgaccggagtatcatccgcattttctgacgtaatcggctgatccgctttggcatcccaaaattcaaagccttctcccgtttcgctgtatcggtatgcgtgcgtgtagccgtgaataatgatgctaccgcccatttgctgaagttttttcaggacgctgaccatttttggcttgtccgccaggtatactttttctccgttttccggattgagatagaccggaatgaccgccagaataaacggaatgtgtcttttatgcaggtaagcgcccgcttcgtaaagcaatctttcatctgacatcggactgatgtcttcaagccgcaaataaaggagggtgccgccctctgattctccgaatgcgctgcgcatcgctttcgccgtcagaaacgaatcatttaacaggctcgtcacaccgaaataatagtcagagcgcgccgttttccacataaaagggcgggtgctgccgtcaccggaccggtatgtataaagggactttccttttactcccgatacgccgagcacggacacccccttttcaagcggcatgtctgttttttcttttttgccgtaaatgcggtataccgtttctttttctgtcagggacaaccccgcaaattggcggaactgtccggcgttatagccgatgctgataagctgctgcggcatgctgctgatcagtgacacaaatgatgtgctgagcttttttttcgtgacgccgtaatagatgacgcgccgattctttttgaagtccgcggctgtgatgtctccgtcgcttttcacggtgacggcggatgagaaatggcccgcggtcagatcaagcattttgacctcagcggtttctttgccgtccgtgcttgtataaataatgagaatgccgtcctttttgtcttttgcttccgccggacggggaacataaaccgccgaaatcatgaaaagcgccgagagtaagagacgtatccatttagagttcattcatcatcatctcgttttccagttcatttaaaaattgctcggccgtttgtaaatcctttcggtacgccaagtaacatacacggaaggtgatggagacgtatttaccgttttgcagccggtacgtatccaattcctttttcagcttcgccagaacggccggcatgttttcttcaggcgtatgggtcagcacgatgccgaaccgttcggcggacggcctgaattttttgtctgtttcccgaacgcttgaccggatttggcggctgataaacgccagcagccgatcggtctctttttctccgtatagggatttgaattccttgaaataatgcatgtgcagcagcaaaaagacgaaggaattgccgtagcgttccgcccgcttgatttcctcggaaagctccagcttcatccgcagatggttgtcaaagccggtcaccctgtcgacggcgacaaagctcgtaatctcttcacgcagctgtttcactgagcgttcaagccccttcgccaactcgtgaatccttcccgctatgtaagaaaagagcagcagcgcaatcccccaaatgaccagcacctgcagactttcggcatcggcagacgccataaagctcccggtctgaaaccacaggagcaggctgccgagaacaaataagacgagtaaggtcatgacgagcgcgtagattgccccgaaccatataccggctcccgcaacaagcaatgtgatgcaggttatcagaagccctgcggattgctgagacgcatagtaaataaaaaaagacagcagcaccagcataactgctgtgtagctgcacagtttttgtgattcattgaatgatattttcattaaacaatttcctttcagccagaagcggcagcaggttatcgaaagaatgtgtatcgctcccgctcatatagccgccgtaatcgggtttcagcgtgtccagtgtttcaaatgaagtcattctttcataaagcggcttgatgacagccggatcagctttttgttctgctaaaaaaagaacggccagggcgtaaacggacggtgattcgtactgaaccgccggctccttcgtgtctgcgctgtatcgtccgtacagctgtccgcgcgacttaaattcctctatcatccattttgacagcgcggcagccttgccatcgccccgcttcagattcacggcggcgtacagctggtcgatgacattcacttcgctgtcatatttgtattcctttgtttcggtattgaatgatttcggcagaaaaccatttttcaggggagctcgattgagaacatcaaggttccggttttccgttttctcatcgataatccctttttctctgagcatctgtaaggcgccggggtcaacataggacaaggtcacggtctttgatgcggcatttgaagcggcatcataataatccgtaaaatacccgtcatttgtattgtatttttccagcgccttcccgatctgcaccgctgttttcccgtattcactgtttccccacagggttccggcctcattcagacagttcatgattctgaaatcgtcaattaaggcattggtgccgctcgctttattcccgtcaatcttccacgacacgagcccgtttttcgtcagaaacgaatcggtgagaagctgatattgcgcttgaaactgccgttcatctttcctgttcagcaaaaatgccatccatagtccgagagactcagataaatattccggctcaccggatatgttcgtccggatcatcccccgcccgttcatcaatttatgataaataaaatgctctgcgggctgaagcggtccggacggttcggccgccgtctgtttttcaggtccggcctccgcgcaccccgccgtcagaacgattgaaatcaaaaggatcatcagacgaaaaacgaattgcttcacagtccatcctcctattttacaaatccttttttagacccatatcttattttttcacaaagtatttttactataaaggaaacgataaaagaatactagcattttttcacattggaaaattttaaatggaagcgccgcctctcaccttttccctcttcacatggatcgtattcccattacagtaaaaaacacaacaaaaggcagcatttctttacaaatgctgcctttctctgatctatttatccaggccgagttttttcagctgttctgccagcgcgttgttcatcggctcctctttgttttggcttttcatataagagttaatgtcccgcttggatgcgcgtccggatttatctttcgccttccgcttttcaaagacggacagtttctcccggtggccgcatacacatgcgaaggtttggccttcgccctggccgcgaagctccattttcttatgacagttcggacagcgggcgtttgtttttcttgccagcgttttccggctgccgcactcacgatcctgacatacgagcatcgtgccgcgtttgccgttgactttaagcatcattttgccgcaatcagggcaggcggtgcctgaaatgttgtcatgtctgaaagtctggctgctgtttttgatctccttcaccgttttgcccgcatatgttttcatgtctttaatgaacacggcggatttcagtttgcccgctgcgatggcggagagcttttgctcccattcagcggttaaggccggcgatttcaaatcttccgggacgagctgtaagagctgcttcccttttgacgtaatgaaaatatctttttcttttttctcgatcaagaaactgttgaacagtttttcaatgatatcagcgcgggtggcgactgttccgagtccgccggtttcacccaatgttttcacaaggttcttctcttctccctgcataaaggcgcttgggttctccatcgcggataacagcgtgccttcattaaagcgcgccggcggtttcgtctgaccgctcgtttctttcaatgatgagacagtgaggcgctgcccctgctgaagatccgggagcgtctggtctttgtcttcctcatgatcgtcgtcatcctcgtacatatcatacacggctttccagccaggcgattgaaccgttttcccttttgcggtaaatgtttcgccgccgatatcggctgtgacctttgtttcttcgtattcgaacgccggcattaacacggcgagaaaacgtttggcaatcagatcgtaaagctttcgttctttgtcgctgaggcttgaaaggatcagcggctcctctgtcggaatgatggcatggtgatccgatactttcgcatcattgacgaatcctttatgcgctttgacgccccgcttcagtatttgattgacgtactgggcgtacggcttaacttccatgccgtttaaacggtcttttaaagtcggcacgatgtctgcggaaaggaatctggaatccgtccgcgggtaagtgacaagcttatgctgttcatacagcttttgaagcacggacagcgtctcttttgcggagaaaccgaagcgcttatgagcgtcccgctgcaattccgtcaagtcgtaaagaccgggagcgaagctttttttcgccgtttttttcaattctgaaatgactgccggctttccttgcaggtcttttgccaaacggccggtcaccgtctgatcgaacgttcttgtctgttttgtttttttatcctgccatgtcagcgtcatctgatcagccgccgcgcggaggccgtaataaggaacgggtttgaacgcctgaatatccgcttcgcgtttggcgatcatcgccagtgtcggagtctggacgcgtccgcatgacagctgcgcgttaaatttcgtggtcagggcgcgggtcgcgttgatgccgacgatccaatccgcttccgctctggcaacagcggaatgatacaggttttcgtactctttgccgctgcggagcttttgaaatccttctttaatcgccttatccgtcacagaggaaatccacagccgcttaatcggtttgcggacgtttgccttttcgataatccagcgggccacaagttccccttcccgtcctgcgtctgtagcgattacgatctggctgacgtctttccggacaagctgagctttgaccgcattgaactgttttcctgtttttttaatgacgacgagctttaaaggctccggaataatcggaagatcctcaagccgccatgattgaaattctttgccgtatccttcggggtcagcgagcgttaccagatgcccgagcgcccatgtgacgatgtagcggtcgccttcaagatatccgtttccttttttatgacacttcagaacacgggccaagtcccggccgactgaaggtttttcagctaatacaactgtttttgacatgcttttcacttctctttctttcacactcatcctgttattataacagacttcctcacgctctctctaatcgaggacgttttttgtgtcaatttctgagaaaatgacgtgggtcacggtttgggcatacggagaggtgcggttgatgaagtgttcgatcgtttccagactgtccgcgttaatcttcagcatataacacgccgccccggcgacccgaaaacaaaattcaatgttgggaatggattgaatgtaggttttgaattgatcgtattttccgtttttcaccgtcgcttcgacaatgcaggagacggggagcccgatctttttttgatcaatgtccaatgtatagcgcttaataacgccgaaggattcaagctgtctgacacgctctgtgacggacggggctgacaatttgatttttctgcccagctcccgcatggacaggcggctgtcccgctgcagctctttaatgatgctcagatccacattatctagtttcatgactgtagtccttccttacccttttggctatattatcaagagaaatccgaaaaatgacaagaacaacaggctgaaatcatgaaggttttttcaggaactgacgcgaaatggtcatattaggactgccctttgcttatagtatagaggaaaaaagatgtccgacaggagggagctgtatgttacacacgccgatcggcagacttcgcacgatggggtttattgaaggaatgtcgcttttggtgctgctgtttatcgcgatgccgctgaagtattgggctcatcatccgctcgccgtcaccattgccggttccattcacggcggtttgtttatcatttatctggcggtgctggcgtatgcggcgtttactgtcaaatggcatgtgaaatggtcagccgccggttttatcgcggcctttattccgttcggtaattttatttatgatcgcggcctgagaaattatcaataaaaaagctcctcttctgcagaggagcttttttcatgcgttacatccatttcgtcacccaggcgatataataagcgccggggatgaatacgagctgggcgagaagcgtgcccgcgacccttgatgtgaccatcgtcaatgaggtccattttaaggagacgtagctgcgcttgcccttcgccacatcgtctgccagtacggagactttcgggtcaacaaacacggccagcagcatagtcgcaacgccgttgattaagcctgatgccataacggccgtcgtgctgtgctcaggcgccagaaggccggcgtacagagcggacagaacaccgatcgtgtaaatagacgtaatgaccatattaatgacaaacaagcgtttcggaatcattcggaattgaagcccctttaaataggagactgacggcagtctgatataagaacgcgcatgcttcagcccgttcagtgaaaatccttttttaaatacctgcatgacggagcctcctccgtccgccaagtgtataatcgccctggagaataacgcgacgaatgtcggcaaaagacagatgccgagcatcgttccgaccgtggagccgaatattaaaaatcgaaactgagcgcccacaacagacagagcgtttgatccggcggcatcaatcagatgtccggtaaacggctgctgaaccatgtttgacatgcgcgacacaataaccatgacattaaataatgacagcgcggacgcgataaatccgactctcgcgccggaaagccgtgttgcataggcaagcgtttcaatcgaatgtatcagcagcagaaaacagaagataaacagtacttgtgaagtaataacgtgcaatgtatgattcctccaaatcttttcatactgattagactctgcagactgcggcaaggtttcggccgtttacataaaaaaaccgcccggatgtccggcgcggttttgtcttattcttttcttacgcaaataaataatatatggttgcccgccttagcctgcgggtgattcgtattaacagttccgacagaatcattcttcgaaagtaaacaccatggaagttcttgaacacaagacaacgaaagccctacctctcaatcgtcactgcggctccgaagccgcgccggtgtgaattgtaaaacaaaaagtcttttttccatctcttcgttaggggcgaatatcagaaggaaaagaataagctcagctttttttcaagctgtccgttgaagcctgaagcttctatatcaaaacagaaaaaagaagtttactttcttttttatttgcatgttgtcacttagcagttaagtataacagattgcccctgaataatcaaatgatttattaaagttccagctcggccggcgttttttcacccgcattcatgagcttgatctgcttcggttcaatttcgagaatcaccaggttcggatcgtcttttccgtcaaaccagcgttccagtttcggatcccacagcttttcttttaaatctgctgagttgttcagtttggcggttccggccacttccacataagcgtcaccgaatccttcacagtcataccctaacagaatatgaacattcggattgttttcaatttcttccgctttatgagtgtctttgctcgtcggcgtgtaaatcgttaagccgtcatggaaaaatgtcatgtagcgtgaatgcggtttgccttgctctaccgtcgcaagcgaaccgactttatgatgatccagtacttcaagcactttttctttgatttcattttgattcatgaagaatcactcctttttaacgtctccgctgttacttttccacattggggagacatttaaaccaagaaatgtgctcttctgccgatcttcgctccattcccgcttcagcatgctgtagttcaccgtgtcatgataggcgccctgtacaaaaatgccttctctcgtcagtccttctttctgaaatccgagccgttccgccaccgccctgcttttcgtgtttttttcagccgcgctgatcatgatgcggttcagcccgaggtcctgaaatgcatgggtgatgaccgcccggcagcttgcggtgataatgccgaatccttcatgctctcgatccagccagtagccgatctctgctttttgattgactgtatcgacattatggatgctgatcatgccgcaaaaccggcccttcacaaaaattccggcgtcaaacccattctcttccgcatatttatagcgccattcggggatgatcacatcgcggtacgtatcgatgtcagccagttcttccgcccagctgagccattcgctgagatggttttgatttcgcttcataacagaatacaattcgtccgtatcttctttggcaagcaatctgatcgtcagatgttcccggatttgacaggaaaacacgaccgcaccttctttcctttattagccattatacaggtaaatttatttttttccatacaaaaaagatgaggcgtgcagcctcatccttaaatgcgcgggtcggtgaaaacatcgtgatcatccgtgcttgtcgatgacatttccgtaacgaccgccccttcttctcccgcttgaaaccaatgcttcgtatccggcggaatggtgtattgtccgcccggctcaagcacaatctcatgccagacggtgtagtattccttgtcttcttccggcgggaggacgcttgggttctctgtcttttcgccttccacgtagagatacaccttcccccagcggcatcggaatgtctcttgttttcccttctcgccgccgaccggcggatggcggtgttccggacacgtctggcgcgggaagagcaccaattctttcgaacagtagcggtcggtattcacgtaaataaacagctgaagcccggtttcctcaagcttgcctaagccgtaatccatgatttgaatgtcttcgacttcatcatcagtcagaacgattcccgctttttgatagtatgcattcacgtcatgtttcgatatcgtcatcggtcagcctccttatgtggtcacaaatctgccgccgttgacatgcagcgtctgtccggtcatataagaggattcgtctgaggccaagagcacatagcagccgacatgctcaacaggctggcctgcccggcccatcggcgtatcctgaccgaaggaagcgactgtttcttctgagaatgtcgccggaataagcggtgtccagatcggccccggcgccacggcgttgacacggataccatcgttgacgagcgcttgcgccatggatctcgtaaaaccgttaatcgcgcctttcgtagccgtgtagtcaatcagctgcgggttgcctgtgtaaggattaatggatgtcgtattgatgatcgcgctgcccggcttcatgtaatcaatcgcttttttagtcaaataaaattgtgagtaaaagtttgtcttaaaggttctgtgaagctgctcgcttgtgatgtctttaatgctttctttcggatgctgttccgcggcgttattcacgagaatatcaagacgcccgaattcttcaaccgttttttcaacggcttcattgcaaaagtcttcctcaccgacatcgccggggattaacagacattttacgccttcttcttccactcgtttttttgtatcttccgcatcatcgtgttcatcaaaatagacgatcgcgacatttgcgccttccttcgcgtaagcaaccgcaacggcgcgtccgataccgctgtcgccccctgtgatgagcgcggttttcccttttaatttgtcagcgcctttatattctttgtattcgtaaacaggcgccggattcatttcgctttcaatgcccggctggcggttttgtgattccgccgggaattccttcggatagttttccatgtcaagttcctccttctggttcgttgtcatatttcttgtctacctctgctgtcttccggataaacatgattgagacagttcaaaacgttttcggagaaaaatgtttcacatggaacgcaagaaaaaaacccggctggcagccgggtttttgttctctattatgaacgtaccgcttgtttgcggagcacgtcttttctcacttttccaaggttgtttttcggaagttcgctgacgaactcaatgtccggaattttaaaggcagcaagacgttcttgaaggaatcgggtcacttcttcttctgtcaggtcttctctgccgtttgtcacgatgaacgctttcggcttttcgccgtagagcggatcagggataccgacaaccgccgtttcgagaattcccggcacttgctgaatgacttcttcaatctggtcaggataaatattatcgccgccgtagatgatgacatctttataacgtccggtgataaagataaatccgtcttcatccacatagccggaatcgccggtatggaaccagccgtctttcagcacttttcgtgtcgcttcttcgttaccttcgtagcctttgaataaaaacggacttgtcacaacgacttctccaattgagccttgcggaaggacttcacctgtttccggatctacaacgcggacgtccacttcttccatcggtttacccgcggaagcggctttatccattcccatttgcggattccaagagctgatgccccacgcttccgtgcttccgtatccgtgcatgagcgggatgccgatgtcgagatactgctggatcaggctgcttggcacctttgtgcctcccgtcatcatataaacgatagaagacatgtcagtctggtgcgtttcccatgctttcagcaggtatgtgaaatagactggcagcgccatgatggtttgaattttttctttttcgatgagcttcaagttttccacagggtcctgattgtctgtcataatgaatgtcgttccgctcatcgtgccgaccatctggcagataatcgcgctcgtatggtaattcggatggcatgctaagaagcggacatgctgcattctccccgtgtaagccaatgtcgcgtttacgtagttgtatatgccgccgtgagtgatcatgcagcgtttcggattgccggttgtacctgaggtaaacatcagcaatgccgtatcgttttcagacaccgtttcgacatccggtgtatcaccggagcctgtcaataaagcgtcaaactcaggcgttgtctccgcagctgttcctgtctcgatcttcagtttaagagaagataccagcgcaggaagaacttcttccataatctctttaaattcagtgccgaaaaagacagctttcggttcacaggctgctaaaatgcctttcatttcgtaaggtgttaattgccagctgaccggcacaacaaccgcgccgatttcgagtgccgcaaacatgacaatggatgacgcgtggccgtttttgcaaagcatcgccactctgtcgcctttttttattcctttatcaagaagcgcttgtgcaagctggttgattcgttttcgatattccgcgtaggtcagggtatgcgcaccgctttttacagcttcgatctcttcgctatttgaaatgtcatgcagaatcatatgctgtaatgtctccatattttcatctcccataatcataaatcacaaaaaactctgtcagattttcttcctcacgcaacccattttaaaccaaaaaatataacttgtaaaacaattttgttttagaactattccattcgtgaatgatacaatagtcccatgtttttagtttcttcccttccccttaccctcatacatgcagaaaaaaacacaccccatatgaggtgtgcgctttctgtttaccgctgtcctttctcctgaatgaaatgataaaacagcttgtttaaacgtttgtataaatcggcttcatcctccgtctggaaggcttttatactgtcttcggactcgatgatggcggagctgaccgcacttagtatttccgacccttcagcgggcatatcagccggcgccatcatcaccaaagcgcggccgacggtcagggaatttccgtccatgcctttgacactgcatggagctgtcaaatcataaattttgaaaaaaggcgtgacaatttcttcatttttgagatggtacagcgccatcgccgttcccggaatgccgagtccgccctgtcgttcacgctctgcaaggcgctgtgcggtttgtttggcattacggacaaatccttcttgctcaagcatggcaaacaaacgattcaaaaacagttcgtacgccgtgtttgactcaatggatttgatcgaaaagttccgcagcacgctttggataaccgccgcataatgtgccatacggccggccgcttccagcatatcaggcgtctccggctgcttctcttctcttttaccgtttctttttttgtcaagaatcagcggaatttttcttttgatgtactgcttcacctgatcagcgtcttcttcgtttaaaagcggactgaccatgacgtaatcaatgtttccatacgggatcggaacggtggatacgatcatgtcatacgcggtgatgtctcggtccttcagttcgatgagggaagacatatcaaaggaacggatttccggaagctcctttttcagtctggatgcgagcattttggacgacccgatgccgctggaacagacgatcagcgctttgatcttcgcttcttcccgtttgatttccagagcggagccgaagtgaagaacgatgaaagcgatctcatcatcagagaaaagaagccccggaaagaatttttccattccttcttctacggccatgtacagcagaaagtagtcgcgtttaatttgctcggtcatcgggttgtacatgtcgatattttctttcacccggttgatcgcaggctccagatgggcgattaaaccgtcgtataaagaaccgttttccgtcagatcaattttgattttttcagaaatgaagccgatcagctgcttcgtttgcaaggccgtttcaacttcaatgttttccggtttgaattccgttttgtattggcggttggcgctccgcaaatgaatggtgatataaccgatctcagcttccggaattgaaacgccaaacgctttttcaagctcttttgccatttccatcgcagagccgtactccttcgtctgctgcagcgcttttagttccgaagcctccatcgtgatggtttctccgagtctgattcggtccatcgcaaaggttaaatgaaccgcaagcgccatgtatgagctgtcagataaggcgatcgcgattttttccttgagctgaatcaagagccggtccattttcaaaagttccgctttatttacgaccccgaacattttttcagcatcgtcaggttttcctttaatattgaattcaaccgcttccaaaaagctctgaatatcaagccggttgacgatgagattgccgacgattttccgtttcgcattttccggacccgtcagctgtatgccgaagcccctttttcggatcagcgtcaagccgaagggcgcgatccaggtctccagctcatccagatcataactgattgtcgcgtttgtcacttgcaattcgttcgccagactgtagagcttgatcggctcttgcgactctaatagtgaacatagaattaaaagtttccgctcctcagcgctgtattcatgctgttcataggacaggtctgacaggagtttttgtttgtcctccgggtttcctaccgctttcagtcctttgccgggctgtttatcaagtgccagaccgaatgattccatcatcggtttgattgtttttaactcgcggtgaacggttcttgtgctgacttgtaaagcttctgccagttcatgcactgtctcgtaacggttctgcagtaatagatgtttcattaatttttgttctctcgctgtcatatacatgaaacgcgcctccagattttctagttgtgagaagtatggcatatggggagtgctgccggggaaagtggtgtaaattataatataaaacgctttcaatgattattcaaccattttcaaatggcaatttggcactggaccgtgtgacagtattgaaaaagaaaaatgtgtcagataatatgccatgacgcttgttactcttgatccgcacggctatacttcaaagtgaccttacttgtttttagacattgcacaccacataaacaaacgcccggaagataccttccgggcgtttgttctgtttatggaatatcgcagccttggacaccggtataaatcctgaaccactgatcatggctgagtttgtacgcggatgcacgcaccgcggcggaaatgcggttctcttttccgctgccgacaatcggcatgatgtctgccgggtgggtgaacagccatgcgtacatgacttcgtcaatggaagcggcgccgatttcttcctgtacggaacgaagcgcggcacggattcggagggccttatctgattgtcctgtaaagacgctcccgcccgcaagcggtgaccacgccatcggcggaatgcgtttttccagacagaaatccagcgtgccgtcatgaatattttccagcttgtacgccgagatttcaatttggtttgtgacgagcggatcatccaaataggattcgagcattctgtactggtgcgctttaaagttcgataccccgaaatatctgaccttgcccgagcttttcagcgcgtgaaacgcttcagccacagcctccgggtccataagcgggtccggtctgtgaatgagcagcacatccagataatccgtattcagattcaaaagcgactgctccgccgacgctaagatgtgagacttcgacgtattataatgatgcgacttgtttcctggccgctccggtgattcaatgacaatcccgcattttgtgacgatttcgattcgctcccttattgaaggcgaaagggacaaagcgccgccgaacagcttttcacacgtataaccgccgtatatatcggcatgatcgaaggtggtgatgccttggctgatacaccattcaatcagattcagcagctctccgtctgaaacattccattcgttcagacgccaaagcccgtgtatcactcttgaaaattccaggtcttcagccaattgaatgcgctgcatgtgaaatccccctttttcttagagcctcttgtatctctgttttcaggaattgcccatgctgtttcattctgcttcggcggccgattttcctttcagcccgcaaaaatcgtcatttaatgattctgaaactgctttttcgctttttcaacgacgtaatggcttccgccgcgttttttgacgtcttgaatcatcatcgcgatcaagaggtctttctttttataatcgtaaccgacaaaccagccgttttctttgccgtctttatcttctttagacgttttcagctcggctgtaccggtttttccggctacggtaatgccgcttacggccggctgatatgcagagccgcgcggatcttcaacgacgcctctcagccctttcgtgatttcttcggcattggctttcgacaccacttgcttatgccagatttgcggtgttttttctccgtctttgatcaatgtcggtttgacgagatttccgtctgttacaaatgcggtatagtcagccgctaagtgcagcggagacatcagcatctgcccctggccgtagcccgtatctccgagaaggatctcggaatctagcttgccgttagcgattgaggacttttcaatcggaaattggtacggaatctcttcatcaaagccaaatgtttttaatccttttgtaaacgcgtccgctccggcatctatggcattttgcgcaaagtagatgttgtccgatgtgatcagcgcgttttcgagatccacttcattcaggcgctctgatacgcgtgtgacatggtaaccgccccagctcgaatctttctgccactcttttccggtgatttttttcttttccgatgctttcaatgtgccgtttgtcaggccgactgccgcggcaatcggtttaatcgttgatcccggcgcataaagtttgttgaatttcgctgaaaacggattgtttttatcttcattcagctttttccactcttttccgctccagccgaaaagaaagccgttcgggtcataagacggtgcgctgacgagcgcgagtgtctctcccgtttgcggttcgagggcgactgccgctccgctgtcatctttcatagaatcatacagcttcgtctgcgttttcatgtcaatcgttacatgaatatcctgcccgctttcggctttcttttcagcaatgacctcacctgtttgcgggacgtaaattttccagccggtcttgccgcgcagcttgtcttcatatacattctcaaggccggcgatgccgattttggaagtatcgctgtattggccgtctttcgcttttttcagctgctccgctgtgatggttttaatatagccggtcagatgggccgttttttcgccgtacggatagtagcgggagctgactttcgttttcgtcacgccgtctaatgcaagcaggcttttgaccttgctttcatcatccggtctgattttttgaatcgggacataggagtcgtcttttacccagccctggttcagtttgcttttgatatcgtcttcagaaaggtccagtttttcagacagtttttggatcacgctgtctttatccttgccgagttttccagggataatgccgatttccggcacctcggtattcacggcgagaccttttccgtctttgtcgtaaatttgtccgcgcttcggttcctcatttgcgatctgcacggttttgtcatcggaaagctgtttgaaaataaaagaaggattccagtcaatgttccatgattctccatcgtctgttttctcttttttcaggacggccgtgttttcaaaagcgaccttccctgcttttgtatccatgctgactttataatcgatgtgctggaggtcatcttttttcttatcgtcttcgtcctgtttttcggcagtgactttcagatttttgacccctgcttgttcataaatggtttcatatcgttttacaaaatcctttttggatcgttttttcttttcatcctgggtgaggctttggtacatcttatcgtaatgaccgccgttccagtcttttacgaaatctttcattctgtcttcggccgattccgttttcgagcagccgatcaaacctatgattcctgcgagtaaaagtaataggtataacccttttttcactgtcaattcccctgccttccaactgttattttctcctaaaccaaatcaggctggcaaggatttttttctcatagcgtttaaaatttttttgtttttccggccgtcacggcccatatttttatacaatgtatctattaaaaaaaggaggaatttcagatgatcagagaagcagccatgctgtatgtaaaagaaggtcttgagggggaattcgaagaggcattccgccgggcggagccgattatcgcgggcatgaaaggttatctgtcccattccttgtccaaatgtatggaaaagacgcataaatatttgctgcttgtggaatgggagacattagaagatcatacaaaaggctttcgcggatcgccggaatatcaggagtggaaagccttactgcaccgtttttattcaccatttcccgttgtggagcattttcaggatctatcagactcagatcgcgtgaagcgtaaaaccgattaaggagatcgaccatacaaaaacggcggtatagatattgaatttcccggagccgtcgttttctttccgtttttcctccagcccctgaatgaacatgaccgcaccgagaaacacgagcataaccggctgtatgacggaggtatgttccgcatacgtaaatgcggcggccgcaagtataataatcagcatcgcgagtgacagttttaaggcgcgcagcaaagcaatccatcctttctgttatcattttttgaacacaattctatttctgtctttatcccccattattctagcgtactttttgcgcggatagaacgaaagtcggacaattttaagtttgttttaaggagcacgaaaagcgcgctccccatgaaaaggagcgcgcggtttatgagcgggcgaggcttccgtatccgagcccccgcaggacgcatgccatgacttcataccccttgctgttggggtgtacgcggtcataagaaagatattcattcatttttcctttgaaagcgctgtggacgtcggcaattttgacgtgcggcgccgatgcgagtgtgctgaggtgcgcattataagaggatatccatttttctgcaatggagatgcccgggaaaggattgtataaattgaagacgcggatctcataaggagacgggtgcgacccttttaaggcagcaatcttggttatcatcttttcaaagttctcatggcagtgactggacacgctggtgaataccgaagcgtccgatgtttgctgatatgcctgaaccgaatcgatcaaatcgttgccgcagcctgtaatcgtaatcatatcagcagcctgaatccgcctctgaatgtacgggaaggacataagcccgagaatttctcccgtctcaaggcctgatttggcaaagatggatacgtcggttcttgtctgtaaatcttctgccatcatgcgcccgaaccgctggacaaaaccggcggaaaacggcccggatcccctccccgtcgtcaaagaatcccccagcgccgtataaacaagtcccatttactttcctccactcgttactatcgatattgtaatgtacgcgagtgaagaaaaattggctcggtcaataacctaatttctcagaaatatgctgtgcggcgtttttgaccttttcggttaaatacggcagcctgtcctctgaaaaccgggcttcgaagccggcgatgctgattccagcagccaccttaccttcgtgattgaaaatcggcgccccgatcgccgccgtataatcttctaattccgaatagctgatcgtataacctgattgcaaggatctttcaatggagtgaagcagttcagcccgatccgtcatcgtgcctgaggcgattgcggcaagctttgtcttctgaatgtatgtgtcaatctcctcttccggcagaaacgataaaatgcttctggcgcaagctcccgcgtacagcggcgaccggcggccgattgccgtatacaggcggacggtttgggtgccttcaattttttcgacgtaaatggcttcatccccgtccctcatgatcagctgaacggcctcatccacttcgctgcacagctcttccataatcggtttggctattttcctgatatccagacgttcagagacgagctggccgaattgtaaaaagatcagaccaagctgataacggccgtccgccgcccgggtgagaaaccctgtttcctccagtgagcttgccatccggtgaaccgaagtcttcggcatttccgatagagaaaccagctcatttaagctcaggctcggttcagtgagaaacaaatgaagcagttccattgatttgatgacggttttgtttttgttttccatggtctttagcccctttgtcagatcagccattccattttgagccttgctttcagctccttcagctgctgttccttctccaaaagcagcatttccgcttcctccagcgaaacggcccggaacgtaatatgttcccccggcatcgtttgggcgacgaggggaagatcggcggatatgatatgcgccattcgcggatagccccccgtcgtctgtctgtcagccagcagaataatcggattgccgtccggcggcacctgcaccgttccgaacgtcacagcctcagataccatttccagcggctcccgcaattcaagcggagcgcccttcagccggtagcccattcggtcggattgaggcgtgaccgtatatgactcttgataaaaacgtaattttgcttcttctgtaaaagcgtgaaattgagcgccttcaagcactcgtatgaccggattttttttcagcggcagaaaccctctgctgctgacagaccaatcaggcgctgagaaaccatactgtccgaaagaatcgctcagacggtacgcgattgattccgaacatggcgtcatacggccgagcggcagctcatcatctttttgcagcgctcttccgcaaaagccgccgatccccgctctgacatacgtgcttttgctttccatgacggcgggcacatcaaatccccccgcgacggcgagataagcgcggctccccatcttgcacggcccgaatgagacgacgctgttttcctttatcaaaaccggtttccacagaggggcgggctccccattaatatgaaaggcgaaatccgcccccgtaacggcaataaccgcgggttctgagaactcaaaggaaggccctggccccataagcgtaacttcaagccccgcctctttttcttgatttccggcaagaagattggcgatgcgcagagagatcgtatccattgcgccgcttcccagcacaccgtatttctgatatcccgtccgccccgtgtcctgaaccgtcgtcaagagaccgggttttaccactttcatactcattcggctccctccttgatgcggctgtactcctctgctgtgatccggacgaatttcaccgtatcacccgctctcaatagactcggcggatgttcttccggcctgaaaagccggagcggggtgctgccgatcagctgccagccgccgggagtggatatcggatacacaccggtctgcattcccgcgattcctactgaaccggccgggatggacggccttggcgacgcctttctcggcgctctgatccgctcagacattccacctaaaaacggaaatcccggcgcaaatccaagcatataaacgagatattcgccttcagtatgaatgcggatgacgtcttccggggtcagatcgttcatttcagcgacctcttctaaatcgggaccgaaatctccgccgtagcaaacggggatttccatcacccggcgctcttttttgcggccggtcattatatggctgagacgttctgtcacttctttcttgaccagggcaaaaggagagacgcctttttttatgtttgagacggcagacacgtcataaaagaccgttaagcttgtgaatgccggaatacattcaacgaagcccggaaacggccgttcttccatacaggctgccgccgcctgcacccggctgttgacctcttcgctgatgtgcccgccaaagcggatgataacggcggaatcaccgtacggctgtatatcaagcgctgtatttccgctatactgcatcattgtcatcacctcgttgtattctttctcacttacaggacagcaagcgattcattttgtatatcggtgatcagcatgtgccccggtgaatgtgttattacgatatcaggctttgcttccatgatcaccgcctggggtgtaacgccgcaagcccagaatacgggaacttcaccttcccgcaccgttacggcatctccgaaatccggctgatgcaaatcgctgatgccgatgctttgcggatttccgatgcggacgggggcgccgtgcacggcgggaaaacgtgacgtgacctgcgccgcgcggactgccagcctttccggaatcggtctcatgctgacgaccatttttcctgaaaacgggcccgccggaatacagtcaatatttgttttatacatgggaacgttcacgccttcatcgatgtgcctgatcgggatgtgctgattaataagggcctgctcgaatgaaaaactgcagccgatcaaaaacccgacataattatccttccaatacggcgtaatatccgttacctcttcagtaagcacgccatgccgataaatcctgtatttcggaaagtccgtccggatatcagctcccggcgccgctattgccggaacgggtgaacccgcatccgtcacatcaagcaccggacaaggcttttgattacgctggcagaataagagaaaatcaaaggcaagatccttttgcaaaacgacgagattggcttgtgcgtaagaagcggccaaccccgccgtcggcccggtcatctgccctttcctgataagctgtctgacttcttcgggactcatatcactcatatggtttttcatatcatcagctccatagctgcggcatttgcgagaataatgtatagatgcccataaccgccatgacaaccactacgatcgcccctgcaatcgtgagccagatcggatgcttgtaatcgccgacgatttttttcttataggcgcccaacagaatcatcgctaatgcaagcggcagaattaagccgttaagcgaaccgaccgcgaccagaattttggcaggctggccgatcgtgacaaaaataagagtggatacaataataaaaccgataattacgccatgtgagtgcttttcgatttttgccgaaaacgatttgaagaatgacaccgatgtataggcggcgccgatgacagacgtgatagcggcagaccacatgatgacgccgaaaattttatagccgacatttcccgccgcaagccggaatacagaagccgcgggattatcaggatcgatgcgcaggccctttgaaacgacgccgagcacggcgagaaacagggcaatccgcataacagatgtaatcaagacgcctgtgacggagcttttcgtcacctgaggaatgacttccttcccttggatgcctgaatcaagcaagcgatggcctccggcaaatgtaatgtatccgccgaccgtgccgccgacaagcgtcacgattgccagcacactgatatgatcaggcataaaagtttttacaaccgcgtgtccgaccggcggacccgtcgttacggcaacatacaccgtcaatacgatcatgacgattccggcgatctgcataaaacggtccatgacttttccggcttcctttatgacaaaaatcagcaccgcgaccgctgcgctgattaaagcgccgatctccggtttgattccgaataatacttgaagaccgagacccgcgccgccgatgtttccgatattaaacgcaagtccgccgagcacgaccagaaaagcaatggcataaccggcgcccggaagcaccatattggcaatctcttggccgcgctttccggaaaccgcgataatccgccatacattggtttgcgcgaaaatgtccaaaataatagaaattaaaatgataaagccgaagcttgccgccaatgtattggtaaacgtggccgtttgcgtcagaaagccgggcccgattgatgatgtcgccatcaaaaatgtcgcgcctaaaagaagcgaccatttgccggaagcctttccggctgtttttttcttttgctccatgctgtcttcctccctctgctgctcagtcttttgcaagcgcgctgatttgaatgtctgccgcttttaattcttttttgattgtttttgcgaatgtcagcgcgtgggcgccgtctccgtgaatgcagaccgtgtccgctttcaggtttacagcttgtcccttacgtgatgtcaccgtgctgtctttcaccatttgaatcacttgaccgaccgcttttttgtcatcctgaatcagcgcatccggctctgaacgcggcgtcagcgtgccgtcttcctgataggtgcggtccgcaaacacttcgcttgccgtcctcagtccgattcgatctcccgctttaatcagctcgcttccggaaagcccgaaaagaataagcccgggatcaaaatgacagaccgcctgagcgatggcttttgacaggccgggattgacggcggccatattatataaagcgccgtgcggcttcacatgctgcatctcgacaccttccgcttttaaaaaccctgacagcgcgccgatttgatacagcgtcagatcatacgcttcctcgggcgtaatcgcgatctgccgccgcccgaatccctgcagatcgaacagcccgggatgagcgccgattttcacgcctttttccgccgcaagcgcaaccgttttgcgcatcacgctgggatcacccgcatgaaagccgcaggcgatgtttgcagatgtcacataatccaaaatctcttcatccagtccgattttataagcaccgaaactctctcctaaatcacaattgatgtcaatctgaaacataagctccctcctgtattgtaaacgttttattttattatcattccgatatttggaacgactattccgaattgttggatttctcttcattatatttaattctgacaagtttgaacatccttttgtcagaaaacctaccatggacctagtcacaaatctgacaaaacaaaaaaagagagcctcatgctgagactctctcttttttctattataacacccagtggcggatcgctttggcgaccccgttttccgtgttgacatcagtcacccagtcagctgtttctttcacgatgtcctgcgcgttccccatggcgacgccgacacccgctttttcgatcatggcaatgtcattcagactgtcacccatggccatcacattttccatcgtgaagccgagtttttccgataccttcgccagcgcagccgctttgttgataccgagggcattgacttcgatgttgatcggacttgagtttgtgatttcgagctccttgtattccttgagctctttcagcacctcattccgcacttcatcatcctcgatttcgaacccgaacttgagccactgatgatccgtaatcgtttccgggaattcccctctccacactctatcgacggtagaggcccagaaattcgtgttgtgcttattcctcagatcccataatttttgaatatgatcggtatgaagaagcttgcgctcaaccagctcaaagttggaatcccagatttcgctgccgtttgccgtgattaaaaaggatgacagctcgagagactcagccagttcgcggcaggtcatcagcgtgcgtcctgtgctgatgacgacgtgaattcctttcgcctccgcttccttgatcgcccgccggttttcctccgggatgagctgctcgtcattgagcagggttccgtccatatcaatcgcgatcagtttaatatctgcgtcttctctttgtatcggcatatatgtacctcactttttatattgtagtcgtctctattttaatacatatgacccacaggaacaaaaaaccgcttcctgcgtttggcggggcgagcgttgaggaaaagaaatattgaggtgatggaggatgaaagaaagaaaacaaaagaacaaaccgaatgaaaatcctgaacatcatgatttaacggatccgattccgctggaagagctgaaggaaaacgccaatgacgaaaaacacaaacatgaccagagggacaattcacaaagtgagagagattatgatacaaaataacacgcttgtccgaaagccgccggtggaggcggctttttttacgatggctggataaatatgctgagctccgcttccgccacaggcttcccggcaacggacgctttcgcccggccgaacacaaaaccgcgtctgattcgcgtgacctcaaaaaaaagatccagacggtctcccggcaaagcggcacctaacctttccgctttcttcaccgcggataagagaccgagaccgtcaccgccggtaattcccgcgcaagccgccgtttgggccattgcttcaacgacgagcgaaaatggcatctctctttggtattcagttataaaccagtcattttcactgatgtttttgtaagcagccgcccattttccggcttcactgttcgtcgtgccgtcaatcaaaagaaacggaaaacgatggggcaatagcttctgattcatcacgcagcctcccttccctctcattataacgcaagaaaaaacccgcgtccccccgacgcgggttcatttttattgattgagctttttgagcacgatgccgtgcagcggttcatgcggctgaataccgcaaatgtcttgaagaacgccgctcgtgcctttttccgcgataagcttttgcagctcaaccgcttccggatcatcctgatagtcaaagcgcagggcggcggcgataccttccgccagcgcattcggttcttttatttttttggccggccctactaatctgtcattcgctccgagttttctgagcggtgatctggcgactcttgtcacatcatccgtgatgtattcattatcaaagcggctgatgatttttttcatgtactgctcgtgttcggcttgcttaaagccgtacgctttcaccaagtactcgcccgtttctgaaagtgcatcgtacacgacacgccggatttccggatggccgatggcctctttgacggtttttaatccgcgctgatagccgacatacgccgtgacggcatgcccggtattgacggtaaacagctttctctcaatgaaaggcgtaagatcatccgtaaacaacgcgcctttaagtaccggctgatcgccggcaaagccggttctgtctatgacccattcaaaaaacggttctacggatactttcagcggatcttcatggtgctgaatcggcacgatccgatctaccgcagaatccgggaagccgactgtccggttcacgagttcccgctccgcttccgtcaaatgtccgaaaacttcttttttcagaaaactgctgccgccgatcatattttcacaggcaatgatattgagaggctcagaggacgttctgcgcttcagaccttccgcgatggacggggcgatgagtctgagaacgttcgggcccaccgccgtcgtaatgatcgccgcttcattgatcagcccgtacagctcttgttcttgcaccgcgctgttgatggctgaaacggggccgatgatttctgtctgcctgccgccgtcggcaagctccacggtatattccttcttttcattgagaaggctgaccatcgtttcattcacatcagcgaaaactacgtcatagccggaatgatggagcagggcgccgataaagccccgcccgatgtttcccgctccgaaatgaagggcaatcatgtcagttcacctcgctgaaaatagcggccagttcttcttccgtctttgcattgatcagccgttcgatgttttcttcctctgagcagatgatggcgatgtttgacaggatgtctaagtgttcattgttttttccggcgataccgaaaacgacctttgccgtattgccttcaccgtattccacaccattcggaatctggatgacggaaatgcctgaatgaagcacctcatccttcgcatcttctgttccgtgcgggatcgcaatgaaatttcccataaacgtggatgatgtttcttcacgttcgaacattttttccacatagccgttcttcacgtaaccgttatcaatcaacgtctgtcccgccaggcggatggcatcctcttttgagttcactgtctggttcagtttgatgttcgctttagccaatacttccatgatgaagatccctctttctgtttgattagtttttaagcttttcaatcagttcatcgtatttcgggctgtttaagaaattatcaaccgaaatgtgcaccgcctgcggcagcttcgctttcgcgcggtcagtcaggtccttatgcgtaatgacgatatccgcgtcattcggaagattattgatcgacgtatttgtcacatcaatatccaggtctgcttttttcactttgtttcttaaaatggaggcgcccattgcgctcgatcccatacccgcgtcacatgcgaagataatgcggctgacttggtcagcggaaatatcagcggcgctgttttccggctcttcctctttgtctgccaatgcggccgccgcttcacttttcctgcctttcatttcctgcattttttccgccgcggctgtcaaatcttcttcgcccgctttagacgatttcagaataagcgccgagacgataaacgatacggccgcagccacgatgacgcccgccagcacgccgagatagcttcctttcggcgtcagcgccaaaatggcgatgatgcttcccggagatgatgcggcgacaagacccgcgttaaagatcgagaatgtgagcagtccgctcgctcccccggcgatcgccgcgaggatcagcatcggtttcattaaaatgtaagggaaatagatttcatgaatccccccgaagaaatgaatgatcgccgctcccggagctgtcgatcttgaagagcctttcccaaagaacatataggccagtaaaataccgagtcccggtccggggttcgcttccactaagaacagaatggattttcccgctttggcggcctgctcgattccgatcggacttaaaatgccgtggttgatcgcgttattcaggaacaggactttcgccggctctacgaaaacgcttgcaatcggcagcaaattcgcgtgaacaatgacttccacacccgccgccagcaatttgttaagagacaggacgaccgggccgatcgcataaaacgcgataatcgtcagcaccgcgccgataattcccgccgtgaagttgttgatcagcatttcaaaaccctgtctgactttatctttaaacagacggtctaattgtttaatgagataaccacccaaaggtcccataatcattgcccctaagaacatcggaatgtccgctccgacaatgactccgatggcggccgtcgctccgacgactcccccgcggtgatcatagatcatttttccgcccgtatatgcgattaaaagcggcagaagatacgtaatcatcgggcttaccaatgtattcagctgcggattcggaaaccaccccttaggtataaacagcgcggtgataattccccatgcgataaatgcgccgatattcggcatgatcataccgcttaaataactgccgaaccgctgtatcttcactttcatgccagcttgctgttcttgctgcatgttcattccctccctgtttgcctgccttcagatgaaaataaataagacacggggtttctctctcccctgtgtcttcatcataaaacgcttacaatccccattcaatgaaaagtaaagaggagtttggcacagagactgtgacaaatccttaacaaaaaaaagacacctcatcaaaggtgtcttaccgctttctgtatataatgtgtccttttgtgacgacgagcttggcaatgagccgctcactgacaataaacaccggatacgcacatacgagcgcgaaaatggcggccggcacataccgcgctgccggaaacatcggcatgacggcggttctggccatctgcacaagataaatcaaaagcaccgtgatcgcaatggccgcagccataatcggagctgatactttatattcacgcaatttcacatggcaatgcccgcactgaaactggcacgggatcatcgatgatctgaccatgtcgcctgtaatcggcttgccgcagttcgggcaggtcgtttctttcatgtttattcctccattcaactcttctattataacagagtctgactgcgtgttttacatttgtgattgttcaacattttttcacatattttatcatcaggctcttgtgtgcatttgtgaaaacatctactcttagagggaggttcatcactcattcgcataaaaaggaggatgcagaattgcttccgattcacagacagcaaaccttgcttgaatggctgaaagaagagggcgcgctgaaaatctctgacataagcgagagattcggcgtctccgagatgaccgtgtacagagacgtcaatcagctggcggatgcaaaccggattatccggacacccggcggcattacgctccctcccgcttcagaacgaagcgccaatcaatgcggctattgcctgcggccgattcagcattcgtattctgttcagcttattaccgtttcacaaaccgttgagcagatgtgctgcattcattgcgcgattttgcggtatgaggataaaaaggatgaagtgtcccacgtcatttgtaaggattttcttcttcagacgacgctaacggcagcttccgcatactttttagtccatgccgatattgaccttcactgctgccggcctcaggcgattcccttctcaacgcttgattacgcagaacggtttcaaaaaggattcggcggggtcatttgcacctttgacgaggcggcggacatcatcttacacgacaggcagaagggatgcacctgcagcaagacataacaacaaccaaccggaaggcggtgtcatcatccatgagacagaacaaacgctggctcgtctttttgctgttccttgttttgattccgaaaacaagcttcgcccacgcctacatcacaaactcaaatccgggtgagaacagcgaattaaaacaagcgccgaagcagattgaaattgagtttaatgaacagattgaagaaggcttccactccattaaggtctataattcatccggtgaacgggttgacgcgggcaaaacggtgattcaaaaaaataatgcccgcatcatgaccgcggcattgaaaaaaaatctgccgcatgatatttacagagcggaatggaacgcggtatcggccgacggacatccggtatccggcgtcatccctttcagcatcggaaaagccggcggagaacttcaggagcagacatcatcgcaagcggcgcttcatcccgaagcggccatcgaccgcggtattttgtacaccgctctctccctgtttatcggcacggcttttttccatctgttttggtacagaaataatgaagattcatcaaaagcaaaacgaactgtaaagctgctcgtgatttctttatgtttaacggggctcgcgctcgtgtgccagctcccgatccagacgaaagaaaacgcgggcggcgcttggagcgccgcgtttcagccggactatgtaaaagaaacgcttctgaaaacggcaggcgggtacgtctggatgatccagatcagcttatttatcctgctcgccctgtccatgatcccgctgctgaagaagaaagcattccggtcatttgcgtactggacggcgccgctgttattcttcttcgcttcgcttttggcaaaagcattcgccgggcatgcggccgttatcgacgaaaaagcggtcggcatcgcaatggactttctccatttatcggccgcgtctgtatggatgggcggtatcgccgcgcttgtgctgcttctttcatcagagtggagagaacccgataaaaccatcgcttgggaaacggtcagacggttttctccttgggcgttcgcctctgtcggcgtgctgttattttcaggagtgctgaatggatttttcattatccgctcgttcgattcactctttcacaccgcttacggcaagacgctccttttgaaaatcggactgtttgtcatcatgcttgcgctcggcgccgttcacgtatggatgacgaagttcagcagaaaaaggagcatcagcgcaacgataaaggccgaatgggcactaggcattgcggtgttattcacaaccgccgtcttcacaagcctgcccagtccgcctccgcccgcgccattgccttttaacggctcagaaacgatcggaaacggggaaaccctatccttgcacattacgccgaaccagccgggtaaaaatgaatttcaagtcattgtcaccgatcataacggcagcttagtaaaagacattcagcaatttacggtcactgtttaccagacgggcttcagcggcaaacagcatgaaagcacctttgatttgaagaagacgaaggaaggcacattcgaagccgccaacctgtccatcaccgaaaagggaaactggaagatcaaagtccacggactgacaaacgattttaatgaaatcaaccaaatattctcaacgacaaactaaggagtgtatctcatgttgaaaaaaaaagctttaatattcatatccgccgtgaccctgtcactcgtcggttttacggctgcagcaagcgcccacgtctcagtcaaacccgcggaatccgcggccggttcttgggaaacgtacacgatgaaagtgcctgtggaaaagaatgagccgacaacgaaagtcgtgctgaaaatgcccgccggcgttgaatttcagcagtatcagccgattccgggctggaaaacatccgtatccaaacatgatgacaaagcggtctccgtcacttgggaagcaaaggacggcggcattcagcccggccaattccagcagttcacgttcgttgcgaaaaatcctgaaaagagcggagatgccgcttgggacgcttaccaatattacaaagacggcagcattgtagaatggacgggtgatgagaaagccgacacgcctcactcgattacgaaaataacgaaatcggcgagcgtgacggatgcgcacggagctgaacagtcaaacgaagaaagcaaatccggcgtatcagcgcttgatattgcggccatcgttctgtcagctgcggcaattatcctttccatcgcggcgcttgtaaagaaaaaacgtgtgtaagcaaaaagcgatccggctctaaagagcctgcgatcgctttttttcttatccgcggcctgcctggaaagacggatatttggtcattcccccgtcagcaaacagcgtaatcccggtcacatagcttgattcctttgaagcaagccagacggcgacagccgcgatttcttccggctcaccgatatatcccatcggaatcatgctttccacatcttttttctgaacgggatcggcaaatttttccgcgttgatcggcgtattgatggcgcccggcccgatgttgttgacacggatgcgcttcggcgcgtactcaagcgccagcgtttccgtcatcaatttgatgccgcctttactcgccgcgtagtggacaaacagcggccacggaatcatctcatgtacgcttgacatgttaatgacgtttccttgaatatcattctctacgtaatatttaatggcttcgcggcttcctaagaaagcgccggtcagattggtattgataactttgttccagtctttaagcggcatttcatgcgactgaaccggattttccatgccggcgttattgatcatgacatccaatgtgccgaattccttcactgcggtctgcacgatgtttttgacatcttcttcttttgtgacgtctccttgaacgatgaccgcttcgcctcccgctttttgaatctcttctttaacggtttgggcgtctttttcattactatagtagttaaccacgactttcgcctgctcctgtccgaagcggatcgccatcgcttttcctaatcctgatgaagctcccgtaatggcaacgacttttccttttaaatccgtgtacatgttcaaacctcctgcatatgttatgaatttgatttcgcaacgcctaagaataccgcggctacaatgatcaggataatcccgatggcaatggcgaccagctgacgcttcgttttgctctcacggagaatgaagattccgccgagcgtgctgatgacgatccccatttgagagagggaaaaacttgtcgcaactccgacgcgcggctgtgagatgaacagaaacatgttcccgagcgcccagatgattcccggcagaatgttcttgagggcgtacttattaaacggtttatgcttgtacgtcaggagcagtccgccgatgaccatcccgatcgcctgcggcagaagcgctgaccatccggatacaccgaacagccgggcgacgacgacatagaccaaatagccgagcgtggagatcagcaggatgacaatgcctttttttaagtttcccggttctccgtccgcccgcccctttttatcttctaaagatgtgagcacaatcccgatgatgataaaaataagggcgagaatacccagcgtaatcgcgatcggggttgaccattctttgaatacgatcacaccgaacaaagaagtcgagacgagctgcattcccgttgatatcggcatcgtttttgaaacgcccatcagctgtatgcttttaagctgattgctttggccgagcgaccaaaacagccccgagatgatgccgacaataaaaatgcgcccggacagcaccggatggacaaacagatacagcacaaacgaaacgatgagcgccccgattgtcgttcccagcgtctggctgtaaggcccgccgcctaatttgacgttaaataacacgatgctcccccaaaataaagccgggagaagagccagtaatatatccatgatggcgaccttctttcaatcgtatttgctgttattttgtctggaatcgaaccgattattcccgcaagatcaaaaaagcctgccggcgatattcaccggcagaccgctcaataaaaaagccccgcttagaagcggggctttcttttcggctcattaaagtccgatagacatgtatttggtttccaggtacggttcaatgccttccgtaccgccttcacggccgatgccgctttctttcattcctccgaacggcgcttgaaccgcggacggaccgccgtcattccagccgatgataccgtattcaagctgttcagaaatatagatgccgcggcggtagttttctgtgaagaaataagccgcaagcccgaacggcgtatcgttcgcaagcttgatcgcttcatcaatatctgagaacgtaacgatcggcgcaaccgggccgaatgtttcttcatgcatgatgttcatggatgtatctacatttgaaagcacggtcggcgtcacgaaatagcatcctttttcgtcgttttggtcatacgttccgcccgtcagcacttctgcacctttttccacggcgtcattaatttgcccgacgattttatcgaagccttttttgttgatgacagggccgacgtttacgcctttttcaagaccgtttccgactttgagtttcgcagcttcttcactcagttttttcgcaaactcgtctttcacggattcgtgtacgatcagccggttcgcacagacgcaggtttggccggcatttctgaatttagaggccattgtttgggctaccgccagatcaagatcagcgtcttcatccacgatcagcggcgcatgtccgccaagctccattgacatatgttttacggtgtcggcgctgtttttcatcaggattttgccgacaggcgttgagccggtaaaggtaattttacggattttcgggctgctggtgaagacgtttccgatttcggctccgtcaccgatcaccacttgcagcacgtccttcggaattcccgcttcatatgcgagacgcgcaagggcgtaagcggaaagcggcgtatcctccgccggtttgatgatgaacgtacagcctgccgccaaagcgggcgcggcttttcttgtaatcatcgcattcgggaaattccacggcgtgatcgcggctaccgggccgaccgcctgacgggtgacgacaatccgtttgcccgttgtcggcgcaggtacggttctgccgtaaatccgttttgcttcttcggcgaaccattcaatatagccggcgccgtataaaacttctccgaccgcttcttcgtacggtttgccgttttctttcgtaattaattccgcaagttcttctttattttcaacaatcagctcataccattttctcaaaagtgaggcacgttctcccgctgatgttttggaccatgattgaaacgcttgatgtgaacgttcaatcgctttttcaacatcttcggccgtctgctgggggatgctttcgatcgcctctcccgttgccgggttgtacactgttaattgttctggcatattgaacattcctttctttcctatagtaaaaccattgaatgcttgttgatgtatctcacactttcatgatagcagacacatccggcgggattccaataattgaactcacagagctgcttcgataatggaaaggccttctttgagctgctcatccgtcacgacaagcggcgtcaggaatcggataatgttgccgttaatgccggccgtcagcagcagcagtccgttctcgttcgccgttttagcgatcgccgcggcttttgctttgtccggttcccgcgtgtacggatctttgacaatttcgatggccgccatcgcgccgagtctgcgcacttctccgatgcaggcatgctcttttttccactcgatcgcttgatgctcgatgatccggccgatctcttcggaacgctgattcagcccttcttcttcaataatatccaagaccgcgagcgcagccgcacagccgagcgggcttcccgcatatgtgccaccgagttcccccggcgcggcggcatcaagcatttccgcccggccgatgacaccgctcagaggcaatccggccgcaagtgatttggatacggtgatcaaatccggaacggcttcgaaatgctcaatcgcaaaatacgttcccgttctggcaaaaccggtctgaatctcatccgctacaaaaacgataccgtgttttttacaaaaagcggcgacgtgctgcacgaaacgttttgaaggaatgatgaagccgccttctccctgaaccggctccattacgacacaggcgacggtttccggtgcgactgcggcgataaagaaatcctcaaaagcgctgatgataaagtcgtcatactgctcgtcgctcatgccggccggcttttgataatagtaaggaaacggcgcttgatacacctctgaggcaaacgggccgaaaccgtatttataaggcttcaccttgctcgtcatgctcatcgtcatgttcgtgcggccgtggaaccctcttgtaaatgacacgacagcctggcgcttcgtatattttctggcgattttcacggcgttttccaccgcttccgcccccgaattgagaaaaatcgcttttttcgcatgatctcccggcgcaagggcgcaaagtttttcggccagctcaatataagacggatacatcatgacgttaaatcccgggtgaatcagatcctccgcctgtttcttcacggcctccaccactttcggatgagaatggccgacattcagcgttccgatcgctccggcaaaatcaatgaatcgtctgccgtccaaatcgtacaaaagcgccccttccccttttaccgccatgctgcggtttccgttgccgacccccttggaaacgaattggtcccgtttttgctgccactgggcagttgtcacttccgatgatgctgttcgactcatagattccatccccctatattgttttcttatcattctgacttctttttggtatgatgaaaagtaccaaaatcaatttatccatggtatcagaaaggagcagggtctggatgctgacgatttccattaatcattcggaaacggcggattatatctatcagcagatctatcagcacataaaagcggccgttttgaaacgcagcctgatgcctcatacaaaggtgccgtctaaacgggagcttgccgagacgctgaaggtcagcgtgaattcagtgaattcagcttatcagcagctgctttcggaaggttatttatatgcagtcgaaagaaaaggctttttcgtggaggaaattgatacggtttatcatgaagaaacgccttcgctctcattgcctgaagatttaaaagagcgggagccggataagagcggctggatttcgttttctcatatgagcgtggatacggcgcattttcccctgaaaagctggttccgctgtgagcataaagcagccgcccgttcatttcatacactcggggaactcgtccatccgcaaggcttatatgaagtccgtgaaaccatttcgcggcttatttccctgacaaggggcgttacatgccgcccggaacaaatcgtgctcggggcgggcacgcaaatgctgacgcagctgctgacggaactgctgccaaaagacgcgctgtacgccatggagaacccgggatatatgaggatgtaccggctgctgcaaaacctcgggaaaaaggttgcgacgatcagccttgatgaaaaaggcatgtccatggccgaaatcgaaaaacgccggccctgtgtattgatcaccacgccttcccatcaattcccctcaggcgtgatcatgcccgcttcccggcggattcagcttttaaactgggccgccgaacagaacggccgcttcatcattgaagatgattatgacagtgaatttaaatatgacgccgatacgataccggcgcttcaaagccttgaccggtttcaaaatgtcatctacatggggaccttttcaaaatcccttttcccaggtctgcgcatcagctatatggttctgccgcccgggcttttgcggacgttcaaagagagagcgtatgacctgcatacgtgcagcacgcttgcccagctcgcgctgaaagaatttatcgactcaggtgaatatcagaaacatattaaaaagatgaagcagcattataagaacatgcgggaacgcctcatttcggctttagaagaaatattcggagaaagaatcagtgtaaagggcgccaatgcggggcttcattttgtcactgagtttgactgcgcccgttcagaaaaagagattttggcacgggcggatgcagaacagctcgatctgtttgcgatgagccggttccgtctgaaagcaggaggcgattcaaataagccgcagctcattctggggttcgcccgcctgaaggagagcgatattcaagatggcgtcctcaggctttaccgggcggttttcgacgcataaaaaaacccccggaattcggggacttatttaccagcggtccggttctgtctgcaaaatcgcctccagcaggccgggaaacgccgcttgtaaatcatctttgcgcagggaataataacggtgcttcccgtctatgcgcacttgggcgatccccgcttcccgcagcactttgaagtgatgggacagcgttgatttggcgacccggacatcagcgcaggtaccgcacgttttttctgttgtttccgccaattgtttgaccagctctaagcggagcggatcactcagagcatgaagaacctttgtcagctgtaagcggtcggtttcaggatggtttggaatgttcatgagtcaaatgtaacacataaaagcggcgggtgacaatttaggcggtgagggtttttcctttaccattcactgcgaaacatgttacagttagttcgataatattcgaactataacaaataaacccaatcaggaggaataacaatgatcgtcttacaggcttacatgaaagtaaaagcggataaacgcgaggaatttttaggagaagcacaatcacttgttcagcattcacgcgcggaagaaggaaatgtgcaatacgatcttttcgaaaaagtcggtgaggaaaatacattcgttatgcttgagcaatggaaagatgaagaagcgatgaaattccacaacgcaactgaccatttccaaggattcgtggcaaaagcaaaagaagtgctgagtgcgccgcttgacgtcgtccgcacagaactgtcagagtaacgaaaggatgaatgacatgaacgaagtccttcaaatattaacagaccaccgttccattcgcagctacacagatgaacccgtatcggatgagcagctggaccttatcatccaagcaactcaggcagcgccgacttccattaacggccagcaatttaccgttattgcggtgaaagataaggagcggaagaaaaaaatatccgaattggccggcggccagccgtggattgaccaagcgcctgttttccttttattctgcgctgattttaaccgcgccaaaattgcgcttgaagaatataatgatacaccgcttgagatcacgaacggtttagagtccgttctagtcggagccgtagatgtcgggattgcgctgggtacggcaacggctgcggctgaatcaatgggactcggcactgtgccgatcggcgccgtgcgcggcaagcctgacgaaatcattgaattgctgaaacttccgaaatacgttttcccgatttccggtctcgtcatcggccatccggcagaccgctccgcgaaaaaaccgcgtctgccgcaagcagccgttctgcatcatgaaacgtatcaagaagaagatttaagaacccatatcgaggcctatgacaagcagatgtccgaatacatgaaaaaacgcaccgacggacaggaaacaagaaactggtcacaaggcatcacttcctactataagcaggtttattatcctcacattcgtgaaatgcttgaaaaacaaggatttaagacggataaataaacgtatcagcctgtcggaacactccggcaggttttttctatttctcaaacaaaagcgttgacactatgtaaaaatttttgttaatattttcatcatatactcattggttttctgtgaaccgatgggttttctattgtgacgaaagaaggaatctgggcttatgaatgataagaaaacggatattctgctggcggcaaggaagcttttttccgggaaaagcttttcgtcggtctcgatgcaggcgatcgcagaggagtgcaaagtctccaaagcatctttgtataagctgtttgaatcaaaggaagacctgctcctggagctgctcgattttaaccagaaacagatggtagcggccgcttcattattaaatgaagaaacgagcctctcccctgaggaacggtttgccaaaaaactgatggctgagcttgaaggcttcaggcgcaaccagcagttttttaatatgctgatgtacggaagcccctcttccattaatgagcgggtaaaacggcatattcacagggcccgctccacctttatctgctggcatcgcgattcactgattcagacgtacggcgaagacattattccttatgtatgggagctggtgatcgtcctgcaggggctcctgagagaatgcatcacgctgattaagctggaaaaagaaccgctcgccctggagccgctcacggactttatcatccgccatctcaatctcatcgtcgaaaacaggaaaaccgaaacggctttgcctcaggagatgattgacctttataccgcctccgcttcctcatttgagccaaaagacaaaaccgtattgctggctgaaagcctgaaggaactgaaagaagccgtctcagcccttccggaggaaaaatatgatgccgcaggactcgcttccgcggcggttatgctggagaaagaatcagcggacaaacagccgcgggattttcttataaaagcgctcatcggttatttggagcaggccggaccgctgcaccagccgcttgcagccgttaaaacattgctcaaactataaagaaagaaggaatcagcttgaataagagtattaaaactgcaccatacaaccgctctgtcattgtcgggattcttttggcgggagcgttcgtcgccattttgaaccagacactgcttatcacggcgctgccgcacattatgaatgacttcaatatagatgccaacaaagcgcaatggctgacaacgtcgtttatgctgacaaacgggattttgattccgattaccgcatttttaatagagaaatttacgagccgcaccctcctgatttccgctatgagtattttcacggtgggcaccattgtcggcgcattcgccccgaactttccggtgctcttaacggcccggattattcaggcggccggcgccggaattatgctgccgctcatgcagacggtatttctcacgattttcccgatggaaaagcgcggccgcgccatgggtatggtcggcttggttatttcgttcgcgccggcgatcggcccgacgctttccggatgggcggtcgaagcattctcttggcggtctttgttttatatcatcttcccgatcgcagtcatcgatttgcttttagcgattattctgatgaaaaacgtcacgacattacgagaaacacagattgatattttatccgtgatcttatcgaccctcggattcggcgggctgctttacggcttctcaagcgccggttcctcaggatggaccagtactgaagtgctgacttcgctgcttgtcggagcggccgcgctgattttctttatcgcaagacagatgaagctcaaaaaaccgatgctggaattccgtgtgttttctttcgggattttcagcctgaccaccctgctcggaacgcttgttttcgcgctgctgatcggaacggaaaccattctcccgctttacacgcaaaaagtccggggcgtctccgcgtttgataccggattaatgcttttgccgggcgcgattgtgatggggatgatgtctccgtttatcggccgggtgtttgacagaatcggcggaaaaggccttgcgatgaccggattcttcatcatcctgctcacgtccctgccgtttatgaatctgacggactcgacgtctctcatttggattgtcgtcgtttataccgcacggcttttgggaacagccatgattatgatgccggtgacgacagcgggaatcaacgccctgccgcgccacttaattccgcacggcacagccatgaacaataccgtccgccaagtcggcggttctatcggtacggcgctgctggtttccgtgatgagcagccaggccgcgcacgccaatgcgtcaactccggcaaacgccgccctgcacggcatgaatgcggcctttgtcgtagccgcctgcatcgcgctggccggcttcctcctatcttttacattgaagaaaaaaccgcgtcagcccgagcagcagcaggccgttacgcggtaaaccaaaaagaacccgatcacgtatgtgaccgggttctttttttacttctcgattccgtcttttacttctttcaccatttgcgccatggattccaggccgcctcctgataaataccatgtagctgaatcaaggtagacaacatggttgtttttcacggctttcaccgattttacataatcattttcaaccacttgttttgttgaagattttgtgccgatcgctgttccgcggtcaacgacaaacatgtaatcagggtttgttttggcgatatattcataggaaatgctttgtccgtgcagtgaggcttcgatgtttttgtcagccggtttgacgccgaacacatcatgaatgaagccgtatcttgatttagacccgaacgcgctgattttgccgtcgttcgccatcaccactaatccgtttttatccgtgctgcttgtctttttcttcagatcggcaatggatttgtcaattttcgcaagcttatctttcacttcattttctttgttaaagattttgccgatcacttcggtgttttgcttgaatctgtcaacgtagtttgtatagtcatcatcaagataaatcgtcggcgcgatttttgagaactctttataagaatcagattgtctgtgggcgataatgattaaatccggatcaatatccgcgactttttcaaaatccggttcttttaaaccgccggtattggcgtatttatcactattatatgaagataagtattttggaaggttttgtttcggaagtcccgccacgtgatcctgtaaaccgagttcatccatcgtatccagcattccgaagttgaatacgacgacttttttcggattcttcggcactttgactccttctttgttcagatcatctttgattgtgattgtttcttttgatttgcctgatgttttgtccccgtttccgcatgcagaaacaacaaaaatcgtaactagcgcaatgaatagcaatgcgaattttttcatgactttcacctcatctggtttttaagaaaagtacacaccgatccgctgactgtcaatctcttgaatcgggatggtcatatcataaatatcttcaagcacggaggtttcaatgatctcttccgccggcccttctttgacgatccgtccgtttttcagtgcgacgatatggtctgaatatacggatgcgaagttgatatcgtgaatcactacgacgaccgtttttccgaagtcttccacaagccgcttcaacagcttcatcatttcaacggaatgcttcatatctaaattgttcagcggctcatcgagaaaaatatagtccgtatcctgagcgatgatcatcgcgataaacgccctctgacactggcctccgctgagctgatcgaggtatttatcctttaagtcatccagcttcatataactgagggcctggttgatatgcacccaatcttcatccgtcagtttcccttgggaatacggaaatctgccgaagctgaccaggtctttaatcgtcagtctgatattgatttggttcgtctgcttcaggatgctgatttttttcgccagatcgttgcttttacaggccccgatctcttgcccgtcgaccgtgatttctccggaatccgtcttaatcagccggctcatgatagacagcagcgtgctttttcccgcgccgttcggaccgataaacgaggtgagcctgcccttttgaatggatagagacgttttctcaaggacggttttccctccgtattgtttgcttacatttttgacctctaccatgatttattctcctttaacagcagatagataaaataaatcccgccggcaaaattaatgatgacgctcagcgtcgtggaaaacgtgaacactttctccacgacgaactggcccccgacgagcgcgacgatgctgatcaggacggaacccgcgattaaatacgtgtgcctgtaggtttttaaaaactctctcgccagattgacgacaagcagtcctaaaaacataatcggcccgacaagagccgtagagacagacacaagaatggcgacgacgatgagcatctgtttcacaagcttatcgtaatcaatcccaaggttgacggcgtgctccctgccgagcgacagcacgtcaaaaaaccgcgtgaaccgccagacataaatgcctgtcagaagaaagacagcaccggcaaatcctaaaagatcggtgttgatattgttaaagctggcaaacattttgtcctgaacaacctggaactcattcggatcaatcagcatctgcataaaggatgacagactgttgaacagcgtgccgaacacgacaccgacaagcagaaggaaaaacacgttccgcccctcgcctttaaacatgagctgatacaaaacgagtgacaagagcaccatcagcccgacggagatgacgaaattaagatttttgttcatcatgacgatattcattgaaccgaacaggaacacgatgacggtctgaatgagcatatacagggaatcgaggcctaaaatgcccggtgtcagtatgcggttatttgtaatcgtctggaagatgaccgttgaaaacgcgatcgctccccctgtgagcatcatggcaagcactttgaagcatcgtctcggcagggagtattcccaattgcccagtccgtagaacagaaagaatccgatacatattatggcgagcgccgccagcagcgtaatttttttattatgactcatatgcttttctccttaacagcatatacaggaagatgccgctgccgataacaccgaccatcaggccgatggaaatttcgtacgggaagatgatcacccttcccaaaatgtcgcaaaacagcacaaaaacagcgcccaagagagcggtgtgaggcaggctgctcctcaggttgtcccctttgtaaatcgacaccatattgggaatgatcaaaccgagaaacggcagcatcccgacggtcaggatcaccagtgaagcgatgagcgacacgataatcagaccgatattgacgacgcgtttgtatttcaggccgagattgacggaaaagctctctcccattcccgccaccgtaaatttatccgcatacacataagcgatgatcaccagcgggatactcagatataaaagctcataccggcctttaacgaccagtgagaaatctccctgcagccaagatgacaggttttggatcaggtcgtatttatatgcgataaacgtggcgattgagctgacgatgttcccaagcattaaaccgacgagaggaataaaaatcgcatcattgaacttgattctctcgaggattttcatgaaaaggaaatttcccgccaacgcgaaaataaaagcgatagacattttcacaagcgggctcgctgacgtaaaaagcattaatgaaatcaaaattccgagccttgcccagtccatcgttcccgcagtcgtcggcgatacaaatttattccggctgatctgctgcatgattaatccgcagatgctcaggctcatgccggcgatgataatgctcaccaaacgcggcagccggctgtcaaacaatgtacctgcctgttctttatttaaatgaaaaatatccagcggcgacaaatcttctacaccgataaatatagaagtacacgccaaaaccgccagtagcaaaagtaagtaacgtagcttcatgctgcctccctgcacccatcacaaacggtatgactgattgccaaacaactcccatatatccccactcgtaatgattatcattatcaacgacaactataatcttatcatctttccaagcgcagtcaatacagttttgctttcaaaaacggtcatccgcgggccgtacactaaattgtcttacaatcagtctatcaagaatttgcaggattttctataaccttcatttggctgcttatcattttttgcacatgatgacacgcttgcgggaaacaaatctgacaaacagcggcaaaattcctccacgaaaatacaaatgttctccccacatagaaaaaatccttgatttacatgtttgaaagagagataataaaaattaaatttgtgagaaaatttaaatattaggggatgtaaatcatgaaagttgtaaaattcggaggcagctctcttgcgtcaggagcccagcttgagaaagtgtttcaaatcgtgacggctgatccctcgcggaaagccgtcgtcgtatcggcgccgggaaaacgcttctcggacgatacaaaggtgacggatctgttaatccgctgtgcggagcattatttgcaaaatggtgcagcgcccgagcttgccgaaccggtcattgaacggtacgccgccatcgcgcgtgagctgaacctggatttctctattatagaaagaatccgcagtgacctattcgctctcttaaacagcagcaaagccaatcccgatcagtatatggatgcggtgaaagcgagcggcgaggacaacaacgcgaagctgatcgcggcctacttccgccggcagggcgtgaaagccgaatacgtaagcccgaaagaagcggggctgtttgtgacgaatgaacccggaagcgctcaggtgctccctgagtcttatgatcatttgtaccgtctgagaaaccgtgaaggcttgatcatttttccgggatttttcggttacacgaaggagcatgagattgtgacgttttcccggagcggttctgatattaccggctccattctcgccagcggcttaaaagccgacctgtacgaaaactttactgatgtggacgccgtctattccgtcaacccgtcaatcgtgcggcatccgaaagagattaacgaactgacgtatcgggaaatgcgtgagctctcctatgccgggttttccgtttttcatgatgaagcgctgattcccgcttttcgggccggcatccccgttcagattaagaatacgaataatccggaggcgaaaggaacgcgcgtcgtcagcagccgtgacaatacgaacgggccagtcatcggcatcgcaagcgacacgggcttttgcagcatttacataagcaaatatttaatgaaccgggaaatcggtttcggccgcaaagcccttcacattttggaggaagaaggattgacgtatgaacatgttccatccggcattgacgacatcacgatcatccttcggcacgatcagatggactcagaactggaacacaggctcgtcacccgtctgaagcaggaacttcaagcagatgaagtcacagtcaggcacaatctggcgctgattatggtcgtcggggaagcgatgcgccataatgtcggcacaaccgccagggcatccaaagcactgtccgaagccggcgtcaacatcgagatgatcaatcaggggtcatcggaagtcagcatgatgttcggggtgaaagaagaacaggaaaaacaagcggtgcgggcgctgtatgacgagtttttcgccggagtcttactcccataggacaccgcctcttttttctcttgtccactaatatcccttacaaagcagcttcttttacatattgtatggtatagacaatatggaggtgaagctcatgtcaggatattctggaatcagctctttcgctttgatcgttgttttatttatcctgttggttattgtaggtactgcctatgttggcggtttctaagcatcactccgtctatatgaggacgctgcgggttttgacctgcggcgttttcttttgttttccgccgctgtccaagtccggccgcgcaaaaaaaagactgccgggaacattcccgggcagtcttttcctttgttcaggttattttcttctcacgtcattcctctttcagctacatggaattcagcctgatctgtctggcctgcacctgtcactgtaaaaatcgcggcggctgctaaacaaataacaaaccatttagatttcaatttcatacaaaccctcactcctttgtatttgtttccttgcctcttcgactttcagaaaatagtcagaagaaatcttaaagcaattttgttcatagtaatatttagctgcttctagtgctaaatcctctatatcggcgtataaatttttatcttccaggtaacggaaacacgcgctgattgtttcctcatccggtttcgcctgatacagagcctgcagccattcgaattttaccgtgtaaacgggatcgtctgtttctttagcatattcatatccccgcttgtgatattccgacgctttttctttttttccgagtttaaagtaaatgagtgtgattaggaaatatgcttgaggaagagaattgacgattctttgtgattcaaatgtatcaaccgcccgttcaaagtacggaatcgcttcgccgatgcggtcctgattgtagtagcacagtccgaggttatacagcgccctcccgacaagctgcgctttttgttctttttcggccatttgcaaagcgtgctgaaaatgtttggccgcctgttcaaagcgcctttcatccattaaattgacgccgaatacaaaatggcattgaatgatcctgacgttatatgtgtcctgctctacgtaaatttcataagcgttttttatatgtatcaaagaaaaatacgtttgtttcatatgataataagcttcggccactttaaaataaaactccgcccgttccacgtggtccgatacgaaggccagttttttctcagcttgtttataatacgtaatcgctgagataaattctcttttatcaaattcaaacatgcctttgaaaaagttgacgtaataatcgagaagccctttgaggccggcctggctgttatcaatgttatcaagaatttccgacagggtcggctggtcttctatcttcagtttttccagcggctccaagtagtccagcatcagctgatggcgaaattccatgagggaataataaagcactaagtttgaatcaggctccatacggtcaagctcttgtttgatctcggccttcaagatctccgcatccggcacgctgaatgttctgatgtatcgataccactcgttaattttctgcccgactgctgaagaaggaattaacccgctcttcattccttcaccctccccatccaagacctgtttaccagttattttatcacgtttccgtgtctttccatcccgaaaaacacgcaaactttgtttcggcagagcgcaattttccgagtgaagataaaacagccggtagccagacgggactgccggtttcaagatgattcatgtatcgtattcagcggaaggcggattgtaaacgtcgtgccttttcctttttcgctggcaatatctatcgtgcccttgtgcatttcaacgagctgcctgacgatggacaggccgagtccgtattcgccgtatgccgtattcgtccgggacacgtccgccttataaaaccgctcccatatatgctcaatttcctctttggagatgccgattccggtgtcttcgatctcaatcaccgtttctttatagccttcatacccgcgcagcgtgatgtctccgttttgcgtaaattgaatgctgtttttcgtgatgttgacgagaatctggatcagcctgtcataatcggcgaacactttgacgccgtcctccgcctgaatccgcagctgattttgtttttcctccgcctgctgattgagatgctctttaataatttcaaacacctcgatgagcggcagactgagcttgtccagtttgatttgctgggatctgattttttcataatccagattttctttcacgagcctgagcatccgcttcgtttcttcactgatcagcgagaagcatttctctttatctttttccgggatggtgttgctgttaagcccctccacaagtccgttaatggtcgtcaaaggcgttctcagctcatgggagacatcggcgataaattggcgcctccgtttttccaggcggtcaatctgctctctcgattgcttcagatttttggccatgatgttgaaatcggacgccagcatgccgatttcatcgccgccgctgttcttgagcgaaatatcgtaatccccggatgccacttttccggtcgcatcccgcaatgtctgaatccgcttaacgtgaaatttagataaaagccagctcagcagaatcgtgatgataagggtgctgataatcgcgtaaatcatatagcggttgacctggctgatcatctgctcgacccctctgacgggagacacgagcagcaccgcgcctttaaattgatcgttgatcaaaagcggttttgcgacaagcgatacttccaagccctccgtattaaaacggttcatctccgctctgatctgaacggttttcccttgcttcagcatgtgccactctttacttttgagcttctcgcgcggcggcatatcgtcaggaaaaaagtaaggccgctgatgttcatcaaaaataataaacctggtctcgcgcgtttttaacatgtcctgatacggatacaggcggcgcagatcaagatcgcgtccgttcagctcacttgtgatctgctgggcgtaagaagacagctcatccactttattttgatacgcaaaatctttcacaaagtgcgaaaacagggaaatgataatgaaaaaggccaaaatcaaaatgctgacatggcttaacagcagctgatataagtatttaatcctcatcaaatttgtatcctaccccccacaccgtgtataaaaacggtttttcctcactggacagttttttgcgcagccgtttaatatgaacatcaaccgtacgttcatcgccgtaaaattgatagccccacacctgctcaagcagctgctctctcgaaaagacctggcgcggattttgtgcgagataaaagagcagatcgaattccttcggcgtcagattctcgacaggctttccatgcagaaacacttcccgcgtcttcttattgattgaaaaacacgccgtttcgatcaagtcgccgctttttacggcctgccccgtcgcccggtatcttctgatcaccgctttaatccgcgctactagcgtcagcgggctgaacggcttggtgacatagtcgtcggctcccatttcaaacccgatcacctgatcagactccgtgtcctttgcggtcagcataataatcggcacactgctcgtctctcttattttccggcagatcgtcactccgtccatagatggaagcataatatccagaatgaccaaatcccagtcctcttccgtgaaccgctgatagccttccactccgtcatggacaaattcggcttcaaatccttctttaaaaaagaacatttccgtcatggtgcatacgcttatattgtcttctatcattaatatcttcattgggtcctccgtttatcttgacgcttttacttataatagcaccattttacccggatattttcgcgtttcacaattgttagtttttatttcatcacccggaaatagtttgttcatatttttttcatacatttctcctactatatacatatcggataaccggttctaaagaaggctggttttacaagatctgacacccacacggaggaacagacatgaactttataaaaagagccttttggagcatgaaggcaaaaaagggaaaaacgtttttgcagctggttgtgttttcagtgatttgcatttttgtcctgtccggtcttacgatccagtcagcggcaaagaaatcaagcgaactggcaaggcagcagctcggcgggagcgtcacactccaggctgaccgccaaaagcaaatggcgcagcagcaaaaagacggtgaaaagaggacgtttgaatcaacgccgatttccgtctcggatgccaagaaacttacatctttacagcacgttaaaaattacaacttcctcacgacagcgtcagcaaacgcagaaagctttgacgcgataaaaagctcagacgaatcagccgataacagttccggcggaagccgttttcaaggcggcggaagacagatgatttcagcggatatttcggtcgaaggcgtgctctctacggcgctgcttgatgatttcacaggcgggagctcaaaaatcactgatggccgcgccatcacaaaaacagatgcggacgcaaaagtcgcagtgatcaatgaaacgctggcagatcaaaacaagctgaaggtcggcggctccattacagtttcctcagcagcggatgattctgtgagtacaaagcttaaaattgtgggaatttataaaacaacatcatcaggagacgatcaggcagagcatttttcattcttaaaccctgacaataaaatctatacgccttacaccgcagctgcggcgttaaaagggtctgataacaaaaacagaatcagctcagccgtttattatatggatgatgcaaaatatattgactcattcgttgcggctgcgaaaaaaacatctatagatgataaaacctacacgctgacgacaaatgatcaggtgtatcagcaaatggccggcccgattgaaaatgtcgcgtcattttctaaaaacgtggtgtaccttgtatccatcgcgggcgcggtcattctcggattgatcgtgatgatgtcgatcagggaacgcaagtatgaaatgggtgtcttgatggcgatcggcgaaaagcgctggaagctcatcggacaattcttaacggaaattctgattgtcgcggttatcgccatcgggatcgcatccgtcacgggcagccttgtggcgaatcagctcggaaatcagcttctttcccagcaggtcagctcagccgatgattcccagcagcaaacaagcggctggggcggaggagaaatgccgcggggagacggcatgttcggtcagcattcatccggtgcagatgtcatcagtacaatgcaggtaaacgtttcgctgaatgaccttctgattctcggcgggatcggcgtcgcaattgccgtcatcgccacattactgccgtctgtatcagtcatgcggcttcaccctaaaacgatcctgaccaagcaggaataagaggaggcagcataatgagcctattaacctttcaacagatcggctactggtaccaagataaatcacagccgctgtttcaggatataacgatcagctttgaaaaagggaagttttatacaattgccggcgcctccggaacgggaaaaaccacgtttctgtctctggcgggcggccttgacacacctaaagagggaagcatcctttataacggagaagacatcttcaaaatcggattaaccaaattcagaaatcaatatgtctctatcgtctttcaatctcatcatctgatcccgtatatgacggcgctccagaacgtcacaaccgcgatggagattaccggatctaaggagaacaacaaagatgcgtccgcgctcagcatgctggataaagtcggcatcaccgaacagcaggcccgtcagcgggtgctgacattaagcggcggacagcagcagcgcgtttcaattgcgcgggctttctgctgtgacacggatctgatttgcgcggatgagccgacgggaaacctcgacgaggatacgtcaaaggaaatcgtccggctctttcaggatctggcgcataaagacggcaaatgcgtcatcatggttacgcacgacgaacaaattgccaaagtgtctgatatcaacatccgcttatcaagaggaagtttcacggtcaaagaaaacggcacggccgtttcctgataccgcgcccctgccagcgcagacaggggcgcaccctatatccccctattcaatagaagtgaacgtaaaaagagccagggctgcatcccctcgctctttttatttatatcagctgtaaataacggtcaatatttgattgtccggctgctttgatcaattcttccgcctttttctcttctcccggcaaagcgagccggagcttgtcttcaatgtctttttcagaaagaccgtttcccggcgctcccctcggacagtcgatacgtgcttcatagacatgaccgccggaaaccgtgacccgtacaattgtaaaacggcccttcggaacggcgttgtcagccggctgaatttggtcatcgcagctgcggtgaatccgctcaaatcctttttgaagggattgcggaatcggctcggatgtgaaatgttcaactgaaaaatccttaccgtgcaaagctaaggtgatcacatattctacgctgaaccgacccgcttcgcctgttttcggacgccgttctgtcaatgcggcgtccccgcccggcggataaatcacgtcaatccgttccgtttggccgaaagtgagaccatgttcggccttcagcttgagaatggcgtccgccgcatgatgggccgccgagcaaaacggataaaccttaaaccaaagtcccggactcacgatccgccaagggtttccccacccgtttacaagcagggtttctgcccgttcaagatcgccgtacagtccgaaaaaacctttctccccgtcgagcgcatgagctgagccgccgaaaccggcctttgcaagctttacggcgaacaccccggcttgagcggccaggccggcgtggagcggcttcatttctgtcccgaattgcactctcatgcctccggaacgggcagccgcaaacccgattgctttctgtaattgggtttgattcagattctctgcgaatccgacggcgcatgcggccgaaatggcacctaacgttcctgtattgtgccagcctttctcgtaatgatcccttccagctgactcgccgagccgcgccatcacttcgattcccgtcacataagcaccgagaaaacggctcttgtctatccggccggctgatgcggctgcaatcaaagccgggaggatgaccgcgctcggatgtcctcttacatcagaatgaacatcgtcaaaatcaagcgcatgtgcgatgaagccgttaatgagcgcggattgggacggcgtggttttttgatttctgccgataagcggcgctatcggcatcccgccttcttcttcggccagttttaccagcttttcaactcctgtatcccgtctccccgcaaaagcagccgctgtaaaatcaagcagtcctttgcgcgcttctttcatcgcttcggcggatgtttccggcacagacgacatgacggcctgagcaagtccggccgtcagattttccgtattcattccgtctgctccaatacattgacggcaagccgggcgaaaaactcagccgctttcggaagcgctttttcgtcgagtgtaaaggctggatggtgccattcttctgttccgtttgttcccatccagacgaagaagccggggattttttcttgatataatgcgaagtcttcgccgccgggcgactgttctgcccgaacggtttgaagtccgaggctttcagccgtttgttccgccgcctgtatgaatcgggcatcgttcatcactgacggcaggtaaggaaaccagcggaagtcagcctctgccccgaatccggccgcgattccttcggcaacccgcttcatatgtttcggaacagcgtcccgcgcttctttttgaaacgtccggacggttccttccatttcaacatggtccggaatgacattccaagaactgcccccctgaactcttgtgatgctgacgacggcattgtgaagcgagctgatgtttctgctgacaatcgattgcaggccgccgatgatctgccctgtcgcctgaatcgggtcaatgctgttgtcggggattccggcgtggccgccttttcctttcacggtgatttcaaagcggtcgacactcgccataagcgggccttctttcagaccgaccgtgccgacggggaggtcaggtttgttatgcatgccgaatatcgccgatacaccgtcaagcgcgccggcttcaatgacctgtcttgctccggcggcgatttcttccgcgggctgaaaaataaaccgcaccgttcctttcagctcatgctttctctcatttaataagaaagccgtgccgaggatagatgccgtatggaaatcatggccgcatgcgtgcatcacgccgctgttgcgcgaagcaaacggaaggtttgttttctcttcgatcggcagtgcgtcgatgtccgctctgacggcgatgacggggccgcttttatctcctttgatttcagcgatcactccggtttgaagtttcggcacatcaagaaccgtgattccttcttcctccagccagcggcggattttattcgtcgtttcgaattcctcgcctgacagctcagggtgttcatgaaggtcgcggcggatattgattaaacgtttgtttaatgattcatacgtttcatttgccatttcttcttcttcccttcttagacaagttcggcaggctctcccacttgcttaatgaattttttcgtccgttcgttctgcggattgtcaaacagctcctccggtgttccctgttcgatgatgcgtccgtccgccataaaaataactttgtcggctacttcacgcgcaaaagccatctcatgcgtgacgatgatcatggttgtctgtttttcggcaattgatttgatgacttggagcacccctgctacaagctcagggtcaagggctgaagtcggttcatccagtaaaatcgcgtgaggatcaacggccaaggctctcgcaatcccgatccgctgctgctgcccgcctgacatcgtaatcgggtagctgtccgctttgtgttctaaaccgacttgccgcagcaggtccataccgatctgttccgcttcttttttcggtttcttttgcgcggtgatcagcgcctctgtcacattttgcagggcggttttgtttttgaacaggttgtaattctgaaacaccatcgccgtctgctggcgaagcttgtgtacgtctttgcgcgaataggacgctgcattcagctttgcatcgccgatttcaatgatgccgtcatccgggcgctccagcagattcagacagcggaggagcgttgattttcccgagcctgacgggccgatgatggccgtgacttcgccgcttttgatctcaagatcgatcccgtcaagtacggtaagatctttaaatgcttttcgaatatgtctgacttgtatcatcctgagcctcctcctatgtgcgataaggcttgctgatcgcccgttcgagcagatcctgcagcacactgtaaataatcgtaagaatccagtacatgaccgcgacggctaaatacgtctcaaaatatttgaggttgcccgatgcgtacatttttccttgggcgaacatctccatcacacctaatgtaaaagcgagcgatgtttcttttaacaggccgataaacgtatttcccgtcgcgggaagcgcgtttctgacggcttgcgggaaaatgatccgtctgtacgcctgggattttgtcattccgacagacagacaggcttcaagctgcccctcatcgactgagttgagcgcagcgcggaagatttcagccaggtaggcggcatttttcaggcttaacccgataatcgccgcagttaacgccgtcatcttgctcatcccgggaaagagctgaggcaggccgtaataaattaagaaaagctgcacgagcgtcggcacgccccggaaaaatgaaatatacacctttgacagctggtgaagcacaggaatacgattttttgtgataagcgctaatataaggccgccgatcacggcaaataccatggccgcgacggccattagtaatgtgatcggcaaggcttcgattaacgcgggaaaagctgaaaacataaatccccaatcaatgctgttcattctcgattttcaccgccgtttcttattgctttgcttcctttgtgatatcttcgttaaagtacttttcagacagctttttcagcgtgccgtctttccgcaggtcttcaatggctttgtttacttttttgcggattttatcgtgagccgcatctttcgcaaacgggaaagcgactttttcatagacaatcgggtctcctgctaatttcagaggcagaccggtctttttgatctgggcgatcaggacgctgcggctgtttacataggcgtcaacccgtccgtaagccacgtctttcagcgtaccttcttgtgtttcatatgtttttatgttgatttttttatccgggtccttgctctcaaggtttttcgcgtggtttgagcccagaacggccgccactgtttttcctttcagatcattgactgatttgatgtctttgttatcgtttttgacgacgacttgagtgcccgcatacgaatacggttctgtgaagttatacgttttcttgcgttcgtccgtgacagcgacctggtttgaaatggtgtcgagtttgccggtctggagctcgcccatcagtccgctgaactcaagcagcttccagtccagtttcatgttgatttttttcgctacggcttccattacatccacgtcaaagcctgtcagcttgccgttttctttatatgcgaacggatagctttgtcccgtagcgccgacatgcagcacgttatcgccgccttcgctttcttttccgtttccgcatgctgttaagaccgccaaaagcgcggcagacagcagcaaagcccatgttttcttcttcattgaaatcccgccttttcctattaaaatgttaatcctgcaattgtttttttaaatagatggtgatgtggccttttcctaaatccttttcgcctgcgcggacgtagcctttccgctcgtacatgccgatcagccacggatgcttgtccgctgtgcccagtgacacgaaaggcgcttttaatgtatcgcggagcactgtgttctccagccactccagcatgtctgagcccgtccctttttttccggtttcaggatcgacggcgaaccaccaaatatgagggacaccgtacggcccgggattcggcccccacggcatccgcagagaaatcgtcgccagaatccgtccgtcttcctccaaaacgtaacaggcgtttttttgtatgttattcaaaacgagctccttatccgccgttgctgcggcaaagttgatgccgagcttgcggatcggttcatacgcccgcagtgtcagtgaaagcagctcatcagcgtctgcctccgttgcgagccggtattgtcttgacatgatgagccctcctttagtcggcatatcggtttgccggtttttccagtccgaaatgttctctgagtgtggttccttcatactcttttctgaacacgccccgttcttgcaaaatcggaatcactttgtctacaaaaagagtgagaccttcaggcaaaagcggcggcatgatgttgaagccgtcacaagcttgttttccgacccattcttccatcttatcggcaagctgttcaggcgttccgacaaagatatgatggcctcttgaacccgccacatatttgtacagctcgcggatggtcatgttatcgcgtttggccatctcctgaacgagcttgaaccggcttttaacggcattcgacgcatccgcatccaattcaggcagcgggccgtcaagcgggcaggcggaaaggtcgacgccgcccagatagttttgcagaatgttcaggccgacagacggaatgatgagatcttggagctcttcatattttgcctgcgcttcttcctcggtatcggcgataacgggaaatatccccggcatgatcgcgattttttcaggatcacggccgaaagaagccgcttgttctttaatagattgatagaattcctgcgcggactccaaatgattttgcgcggtgaaaatgacctccgccgttttggcggccagcgcttttccgtctcctgatgatccggcctgaataatgaccgggcgcccttgaggtgtgcgggcgacatttaacggccctctcacggagaaatatgttcctttatggttcaattcatgcattttttctttatcgaaaaatgctcctgactctttgtcacggataaaggcgtcttcctcccacgaatcccataatcctttgacgacttcaacgaattcttccgcgcgctgatatctgagatggtgctcaagatgcttttcgccgctgaaattaagcgcggtcgattcaatcgaagatgtgacgacattccagcccgctcggccgttggaaagatgatcaagcgatgcaaattgtctcgcgatatggaacggttcgctgtatgtggtagacgcggtcgccgtcagaccgatgcgggatgtgacctgagcgagcgccgacagcagcgtaaacggctcaaagcgcgtcagcacattcggatgtgatttgccgtctattgataaactgtccgccaaaaacagcatgtccaatttcccccgctcagccgttttcgccagttctttgaaataatccaaattcatgctcgcgtccgccggtgcctgaggatgtctccaagaagcgacatgatggccggtgcccgcgagaaacacaccgagtttgatttcttttttctttgtcatgatggatctccttctattctgaaatacggttcggaaaatattaacaccactaaacctatatttcctagtaattttataagaataaatcaaaatgtacaattgtcacgcaagtttgtcaatgcattaagacaaaaatcatgattttaaaaataacccggcgcaccgtccgggttatttcttcgaaactgtatagacggtccctttgacctttttcttaataacggcaatgataagcagcaaaacgggaaacagcacttgaaacggaagatgaatatagatcggcacaatgtttaagccttcattcatgtgttccgaaaaattgcttgcgatgctgatggagagaatcagcacccccaatccgaccggaaaggccagctgagacggatttttttctttaaacagcgtggacacacccacgacaaccgcatatgtaaaaaggctgactttgaaaaaaccgccgatgacgagcacgagcatgaaaaagacatccagccggtctaaaaactcttctactttaatcgtctgtatggtgctcagcagcggaaattgagagcggagcattaagttgacgtccagcacacaaatattaatcgccactgacatcgccaaaaacagcccgctgatgataatcgccagaaatccggttttcttcacctttttccgatcttttaaataagggaaaatcatgacaaacacgattaattcaccgaacgggatgaacatcgtctgtttaaacacggaataaatgaccgttcctgcaccctccgctaaaacgggctggagaaatctgaggtttatcgtgcctgagctgataatgaggatcagcccgacggctgtcagaaaatacataatgccaaacagcagctcgccggctctcgctatcacttcaataccctttctgaccgcaaatatcgcggcgatcatcagcatggcattcacaattaaaagcggcgtgtcctggtaggcgaaggtgacaagcatttcgccaaaatcccgcaatacgcgggccgcgatataagaaaaatagagaatataaagaagcgagaccgcccagctcagatgtctgccgatcagttcgttcatgtaatctctcggagaagactcaggaaaaaattgatacagcgcctgataaacgtagaaaagtccgagaccgataacgcacccgagaagcacggacagccatgcatcccgcccggccatcgtgcctggcgggatcaataacgaactgcccaattcaaacaaaatgatcataataaacagctgacgcgtgccgattttcgcattttccatacgcttcgctcctttctcctcaaatcaatcatgctcaagcttgtctgagagaggattattccgcaagcccgttcttctgataatgacttccgttttgacatctacggggagattggggaaatattcttcatcccacttccctttgaactttttccatttgtccggatgcttccgatagatcaggtctccgaagccgacgaagtcattcttacgggcttttatatcttcaattgatttggtgatatctttgtcaagctgcacgctgagcgccttttgcatcgtcatcagcacttgcggatcagacagatggaaagggtatctgacagcgtccaccagcccctcgacctgagcatgcacgtgaatatgcggttttccgttcggaaaagtggccgtcacctttgtattctggcgggtgacctgcagactgattgcgtgcttcacattcttccaatccgcattgatgaacgtatgcttgatcctattgagcagccatacagcccccacactgtcgtcatcctcaatccagtaatccagcctcccatcctttttgaacaccgccagtccgtccgctgacagcactgctttcggttcagtcgtctgcgtattttccatcgtaggaccggctttatcgtctccgtgcatttcataacccggaataaacggcgacccggccggagaagcgagatcaatcagaacgtcctgaaggctggttttaatgactctgccgtattgttcctgcgtgaagctgagcgtcttgttcactttattggaagggattttatcaatcggcgtcagcactttaataatgtcttcagccttgcaattatgcgcgatcaccgcggttgcggtcgtcctgaattcggtgtcgcggtcaagattgtccagaataaaactgagcccttcctctttcgccagcttttcactgaacaccacgagattcgtatgcgcaaaatagagccttctggacactttcatcgagccttttctcaaagcttccgtcatattgtctccggacaccgaatagacggaaaccggaggccggtctcccgctccgccgccctgcagaccgccggccacgtttcccggattgataatttgcaagtgaaggacgtattttcccgtttcggtccggtcaataccgatggcggagatcacagccaaatcagtcagctcccttttatcccagcatccggatacaaacataagggaaaccatcgtacaaaggataagtatccatttacgtcttttcattaccgtcgccctcttctacatctttattaaccatccctctggatgtctccggtttcggtctttgatgttccccttggcgcctgttgttttcctgcacgagcagttccggccttttttcatctgcccataacggagcgcggaggatggaatccttcagcccgcccggggtcaaaggagcgagcggggacatatacggaaaaccgaatgaacgcaggccgcacagatggacgaacatcatgataatgcccagaatcagcccgtaaaatcccatgaccgccgctgacagaataaagagaaaccggatcagccgcgcggatatcgccatgtcaaaagccggggtcgcaaagctggcaatcgccgtcagcgcgacgacgataaccatggccggggagacgatgccggcctgtacggcggcctggccgatgacaagcgctccgactatggaaacggcggagccgacaactctcggaagccggacacccgcctccctgagaatctcaaaagccacttccatcgtcagcgcttcaatcacggccgggaacggcaccgtctcccgctgagccgcgatgacaatcagcagctgcgtcggaatcatttcctggtgaaaggtcgtcgccgccacataaatccccggcgccaccagtgaaatgaagaaaatcaaaacccgcagcaccctgatgcttgtggcgatatcaaatcgtgaataataatcctcaacggattgaaaaaattgaataaataaggccggcgcgatgagaacgaacggcgttccgtccacgataatcgcaaatcgtccttccagcagattccccgccacgacgtccggccgctccgtatgatatacggtggggaacacagaaaacggcgcgtcttcaatgagctgttcaatgtagccggattccaggatgctgtcgatgtcaatgtgcttcagccgcttgcggacttccttaatcagctttttatcgcaaattccgttaatatacatcagcgcgacatccgtattcgtttcgtgtccgatctccattttttcaacccatacatcaggcgtttttacatacctgcggatcatggaaatattggtttgcagagattcagtgaatccctggcgcgggccgcggaaagagacctgagtgctcggctcttgaatggaccggtgctctcccccttccgtgctggcgatcagcgccttgtcagccccgtcgacaaaaatgagcgtgctgcccgccaccagcccggcataaaggcttttccatttttcttcctctttcaccccgccgatcgcaagcgttttatcgtatatcaggcagaccgcttgttccggctgaacggacgggatatcgattaaatcctccagaagggattggctgacaagctgttcgtctaccaaaccggcgatatacacgattgcggccggaagctcttcttttccgattttcagccggcggatgacgacatcggcactgttgccgaacctctcagacagcttcttcatattttgctttaagctgagggagatcggctcatcccgctctttgtccggctggctgtccgcttcttttctgccttcattgtcacggtcgttttgatcggcttttttttgtttcctctgcttaaaaaatggcggcatatcgcaaaaaacctttcctcgtttttttcatattcttcctgtacggcaaaagattatgcacggcggaaagtctgtataagttctgcgtaatcgaaaaggataaaaagggagagtgatgcgcatgaaaatattaggggtttcattctttttgctgactgcctgtctgatcatttcagtaacggtggatatgctgcaaggtttcagtttctatggagcggttcaaaacaacctgtccgcttttaaattgaccaccttctcagaatggctgatgctgtttttattcgccctctttttaatcagagaaatgatcgctttatataaatcaggtaaaaaagatgcctgacaggcgcaaggctgtattgtgtcaaaaaagaacacattcctccttctctcggagttcatgtgttctttttatttttccggcgcagattgttctcagatgacgatatttccgctttccgtatctgtcgcgtgcttcacaatgacgcctttgataatgcggttgccgatgattttagtacttgcggaggagctggtttggatggcggaagcagaagcggcggataggttgttgatggtattgcccgaaacgagggaattggaggctccgttcagatagatgccgatcgggctgcccgctgttcggttgatcgtgagcgtattgtctatgacttcatgcgtgcctgagttcagatacacggtaacgataagcggtgatgattcaaagcggttgctgatgacagaggttcccgaggatgttgaactgaatacgggatagtttttatagttcttaaagagattgcctttgatgacagccccggcgtcatttgtcacagatacggcataggactccgcggcgccctgatacgcattcggaaggagcgtatttccttcaataacggcatttccgcctgtgacccatatgccccggctgaacgatttcagcacattttgttttacaatgatactgccggccgacatgctgattccgtctgtcacctgattcagagtgttattcgtaaagacggcgttctccgaaagcgtcgcccgcatccccgtgcttcgtctcgtttcggaacgtccgttttcaatgacattgccgtcaacggtcacatcttctgcctgatagacggaaatgcccgtattttcaaattgattaattttgttgtgggtgacgaggacgctttttccccttacatctattccggtggaaaacccggtaatcagattgttggaaatgacggcactgctgctgtcctgtccttgtgacacaccttgtccggcgactgcggtccttgagccgccgtctgaccgaaagaagacattccccgtaatgacggtatgcgccccatacccgtagctgattgtgttatcggaatgatttccttcaattaacacattatatccgttaaaattggtgactgagcttgcggcgtttccggaaaagaagttgttgcggaccgtaatatgaagagcttcttcataatcaatatcgccttctccgtacgattcaatatcgattccgaatttcggagccgttccgttcccttgcccggcgtcttcaatcacgcattcttccaccgtaacggtattgcagccggtgattgaaatgttgttccgccttgactgcctgatctcacagcggcggatggtcacctgttctgaagtttcgtaatcactgtttgtttttaacccgagcgggctgacaattataccgtctcccgtaaaatctgaaatcttcacattttcgatcagcacattgctgctgccttcaatacagattccaaacccccattcatgggtcgaccgcaaagggacattggtatacgtgtgttcatcccgttccccgatgatccggccgccggtgatggtgacattttcacgcctgcctatatagaaagccgagtagccccaggagctgttcggcgccactttaatcgtgcattccggatctaaaacgatggtgagatggctcggcacgttaatcccggcgttccgaaacggctggcttttgtccccgccaagcgtgccgttgattttatacgttccgggcggaaaaaacaccgtatgacagccttcgctgacggctctggccaagcattggttgatggcgcccgtcacatcggtttttccgtctgccgccacaccgcaatccgtaatatccaatatacgattcggcaagtgataatctcctccttcctctcttattgtcatcttattccgccatatcccgctccgcctgtacatactttaaattttattaaaaaagtttataaagatagtttagtcagataatataacaaaataagtcattggaatcaggaaaattcgtctatattcaccgttttaatatcttttcattctggaattttttgaattcagtataaattatattgacacaagtattatataagaatatgatttttgtaatacacttttttaagaaagggttggctcaggtggcatctattgataaggaatctataacagaaactgtgccgcaacgaggctttttcggtcatccccgcggcttgttcacactgttttttaccgaattttgggagcgtttctcctactatggtatgagagccatattgctttactatttatacacggaagtcgctcatggcggtctcggctttgataaaacgaccgcagttgccatcatgtccatatacggatctctcgtatatatgtcgagcgtcatcggcggatggctggccgaccgggtattcggcacggcaaacaccgtattttacggcggaattttaattatgttcgggcacatcgctcttgccttccccggcagcacggcggcgttttttaccagcatggctctgatcattatcggaaccggcctgcttaaaccaaacgtatccagcgttgtcggagatttatatacgaaggaagacgagcgccgcgactcaggtttcagcatcttttacatggggatcaacctcggcggattgcttgcgccgctaattgtcggaacactcggacagaagtacaactaccacttaggcttcggatgcgccgcggccggtatgttcctcggactgattgttttcgctctaacgagaaagaaatacctcggcaaagcaggctccaatgtaccgaatccgatttctaaatcatcagtgatcggcacgggaatcggagtggtcatcgcagcagccgttattattgttctgattcaaaccggctggctgacgatccagcgtgtgattgacaccgtcagtatcctcggcattgtcattccggttatttactttatcgtgatgttcacaagcaaaaaagcgacgaaaacggaaaaatcacggcttgcggcttatgttccgctgtttattgcagcggcaatgttctgggcgattcaggagcagggcgcgacgattctagctttatatgcggatcagcgcacgagactttcctttgcgggcatgcatcttgagtcttcatggttccagtctctgaacccattattcatcgttattttcgcgccggtgttcgcgtggatctggatgaagctcggcaaacgccagccttcaacaccgattaaattcgcgatcggcattatccttgccggattatcatttttagtcatggtgcttccggttatgggcggaagcggcgagcttgtgagcccgctttggcttgtgctcagcttccttttggttgtgcttggtgagctttgcctttcaccggtcggtttatccgtcacaacgaaacttgcgcctgcagctttctcagcgcagacgatgagtatgtggtttttaacaaacgcctgcggtcaagccctgaacgcaaaagtagtcggtttgtttgataagatttctgaagcggcctacttcggctcaatcggtcttgtttcgatcattctcggtattattttaattcttctgtctcccgtcattaaacgggcgatgaaaggcgtacaataaaagagaagcctgcggaatcgtccgcaggctttttttgtgcgtctatcgttttaactcctcaagtgtttctctccatctcttcaggacatcttccggttcgtggagctggatggccggtcctgatgtcagatccgcgtatttcgcccgatcttccttgacggtgatcacgcggcagctgaaccgttcccgctcgtgtttcgcctctttcaacggcggaagcgccttacattccaatgtgacgtaatatgcggctcctccgtgccaggcgatgaaaagagcttgtcccgaatgcagcaggctttttacggtcgtcgtgtttttccataaggcgagccggagatttgttctgctcacggccgcgatttcaccggcgctgatcatggccgcgtgcggacggccttcttttgtcacggattggagcacaaatgcgtcgtgctgctttttttcaagttccgttccgtctaaaagcgcgtaaagcgcctccggcaagtgctccgtcagcattacgcttttctttccgggacagcgggaacatgtgtggccgtctctgtttctttcggatcgattttaaatgccgggttgaatgccgccggattcgtgatactttccggttcacaggatctccatgtgaaaaagcaggtttggcattggtatatttcccaagcgcctttgaccggcgattggctgacggtttctcctttttgcgattcacatcgcgggcatgttttcatagtaaactcatcctttcttattgattcattaagtccatcagtttttgttcccactctttcgttgtcagcggggaatcaagcggctgcgaataatggcctcttgtttccggcgcgacaggcgtcgtggcgtcaagaatcattttgtgtgtcatccctgccggatcagaccccgggtcaagcggaaggacggacagatcaggaatgatgactgcatcgtgtttcggatgcattttcgttgagagcgcccacatgacttgcggcaggttaaacggatcgacatcctcatccacgacaatgaccattttgcagtagccgagtccgtgcggcgtcgtcagggcgcgcatgccgacggccttggcaaatccgccgtagcgcgttttcgtggagataatggcgatcagcccgtgcgtatacatcgcattcacggcgacgatttcgttcggataggcttccttcagctgctggtaaagcggcacgcacgtattaatgccgatcatataatcgcactccgtccacggcatgcctaagtataaatgttcaaaaatcggattgtttctatgatatacccgtttgattttgatcaccggcatgctgcggccgcctgaataatggcccgtgaactcaccgaaaggtccttcgtattcccgttctcccgcaaggatctctccttccagaacgacttcagcaccccaagggatgtctaaatcagacaatttagatttaacgattctgtagggctccccttgaatcgcgccggccatttcatactcggattgatcgtataacagcggagttgatgcagccgtcgtaatcaccggctcacagccgagcgcgatcgtaacgggaagattcacgccgcgttcttcagcttggcgaagatgaatcgcaatatcatgctgaggcacgggctgaatgccgaggcggtctttcccctttacctgcattctgtaaatgccgacattctgcttgccgaaattgtccggatcttcaagatcgcgggaaatgacgcacgctttatccaaatagtagccgccgtccccctggttgattctgaatagcggaaggatgtcaaatagattgatatcttccgttatttcattttcatgaaacggcgcggtttcttcccgtttgaccggcaccggaaatgcatcgtaccgtttggcaaactcaaagaattgttctttaacaggcgtatctttcggcatgccgagcatcatcgcgtgattcggccacgagccgatgacattcagagccacctgcgcatcgtgatgtccgtaaatattgttaaacaaaagcgcaggggttttatccccgagattgctggctgcacgcgcggcggcgcccaggtccggctccggttttacctcttcgttgacggttaagagctgcccttctttttcaagagcggcgagaaattccctaaaatcctgataggccattatcagattcctcctttttgtttttcaattccgtaccaccgtttcgcttccggcagacggatgccgaactgatcgagcgtccggaacacaatatggtctatcaattcatccatgtcagccggcttgttatagaatgccggcatcggcggaagaatgacggaacccatttttgtaagcgctagcatattttctaaatggatttggctgagcggcgtttctcttgtcagcagcacaagttttttccgctccttcaggatgacgtcagccgcccttgtcagcagattgtcagccattccggtgcggatgcttgccagtgatttcatgctgcacggagcgatgatcatcccgtccgtttcaaacgaaccgcttgaaatcgccgctgcctggtctttgtgagaatacgtataggatgcgagtttctcgacatcttttaacgtataatcggtttcatgtgtaatggtgacatttgcccaaggagacacgacaagatgggtttcgatctccgcggcttttaaatattctaaaagcctgatcccgaatatggctcccgttgccccggtcattccgatgacgagcttcatattgacccctcctttacgcttgaaatgtggtgtcaaatccatcatactcctgatatatccatatgaaaaatattcgttaaatctatgtatcataccttaaaggtataaaagaaaggagcgagcgttctcatggatattcggcaattgcgttatttcatcaccattgcccaagagcagaaaatcacgacggccgccaaaaagctccatatggcacagccgcctttgagccgacagttgaaacagctcgaagaagaattgggcgtcattctgtttgaccgcaataaaaagaaacaaatgaccctcacatatgaaggaaacgtctttttgaaaagagcgaaagagattcttcataagtttgaggacgctataatcgaggtacaagagctgaaggaggaggtggccgggacacttgccgtcgggtcaaccatttactgcgcagcgctcatgcttgagaaagtgtcacagatgaaagagcggtttccgcatctcacctttaacatttgggaagatgaacccgtctcactgctggagcttctggaaacccggcagattgacgccgccgtcaccaccaccttgattaaaaacgacggcattgaatcgaaggagcttgaagacattccgtgtgtattggtgctgtccgagcattcaaaacgactgtgcggagaaacgattaaactgaatgacatcgcctctttgcctctgatccttttgcgcaccgtcaatggaagaggtgtgtatgaccaagtcctccaagtttgtgaacagtacggtctcgacctccaggttgtttgtgaatgccatgactccgcgacgctcttgagccttgtatcatcaggattcggcgccacaattctgcctttgacgatgattcccgtccatatgcgctcgcatgtcaaaacggttatcatcgaagacaacccgtttgtcatgacaccggccgtcatctggagaaaagacagctacctgccgaagcctgtcagacagtttttggaattattttgatccggaacacgatgaattcccgcttatgaaaaccaattacttgactcatactaaaaaaaagttatcctttacaattgggagctattttttctcaataaaactactcagaaaagtggggaataaagaagatgaaaaaagcattattcgctttgttcatgatggtcagcatcgcaatgcttgcagcctgcggaaactcacaggacagcggatctaagtcaaaagacggcgatctttgggcttctgtcaagaaaaaaggcgtactgaccgtcggtacagaaggaacgtacgaaccgtttaccttccatgataaaaagactgacaaactgaccggatatgatgttgaagtgattcaagaagtcgcgaaacgcctcggtctgaaagctgactttaaagaaacacaatgggacagcatgtttgccggtttaaacgcgaaacggtttgacgtcgtcgccaaccaagtcggcaaaacaggccgtgagaaccaatatgatttttctgataaatacacaacgtcaaatgcagtcgtcgtgacgaaaaaagacagcacgattgcgaaagaggctgatgtcaaaggaaaaacagcggctcagtcattaacaagcaattacaataaattagcgaaagaagccggcgcgaaaattgaaggcgttgaaggcatggcgcaatcccttcagctcattcagcagggccgcgctgatctgacttacaacgataagcttgccgtactgaactacttaaaaacgtccggcaataaaaacgtgaaaatcgcgtttgaagcaggccagccgcagcagacatatttcgcattccgaaaaggaagcggcgaacttgtgactcacgtcaacaaagcgttaaaagaaatgaaagaggacgggactctttctaaaatagcgaaaaaatggttcggcgaagatgtttctaagtaacatgccggaacccgtgattgcaacagccattccgtgggatttggtgcagcagtcattctggccgattctttccgggggaatctattactcgattccccttaccattctttcctttattttcggaatgatcatcgcgctgattacggcgctcgccagaatgtcaaatatgaaaccattgagatgggtgttcagcgtatacgtatcagcggtgcgcggcactcctcttctcgttcaattgttcatcattttttatctgttcccgacatttaatattacgctggaccctttcccaagcgcagtcatcgcgttttcattaaacgtgggcgcctatgcttctgaaatcatccgggcatctatttcatccgtgccgaaagggcaatgggaagccggttatacgatcggcatgacctatcgcaagacattgttccgcgtgatcctgccgcaggcgtttcgcgtgtccattccgccattatcaaatacatttatcagcctgatcaaggatacatctctcgcgtcacagattctcgtcgcggagctgttcagaaaagcgcaggaaatcggcgcgcaaaaccttgatcaaatcttggtcatctatattgaagccgcctttatttattggatcatctgcttcttgctgtcaatcgtacagcatgtgatcgaacggcgtctcgaccgttatgtggccaaataaggaggtttcgatatgctttccgtcaaaggattaaataaatcattcggacagaatgaaattttaaaaaagatagatatggagatagaaaaagggaaagtcatcgccattctgggaccgtccggttcaggaaaaacgacgcttctgcgctgtctgaacgcgcttgagatccccaatcgcggcgagctggcattctccgatttttcaatagatttctccaaaaaagtgaagcaggctgatattctccgcctccgccgcaaatcaggcatggtctttcaggcgtatcatctgtttcctcaccgcacggcgcttgaaaacgtcatggaaggacccgttcaagtgcaaaagcgcgacaaggagcaagtcagaaaagaagcgatagagcttctggaaaaagtcggactgaaagacaaaatggatttatatccgttccagctttccggcggtcagcagcagcgggtcggcatcgcccgcgcgcttgcgattcagcccgagctgatgctgtttgacgaaccgacgtcagcacttgatccggagctggtcggcgaggtgctcaaagtgattaaggatctggcgaacgaaggctggacgatggtcgtcgtcacccatgaaatcaaattcgcgcaggaagtggccgatgaagtcatcttcattgacggcggcgtcattgtggaacaaggaccgccggcccagattttttccgcgccgaaagaagaacgcacgcagcggtttttaaatcgtatactgaatcctttgtaggagccggagaagaagcgaaacactgatttcgcttcttctttttttgggcggttatgctacaatgacaattaatgaatgttatgaaagaagggacctctttgaagcgggaattcttgatgcgctggacgttttattttgccggtctgttgattttgtctttcggggtatcgttaaccattaaaggaaaagctctcggcatcagcccttgggatgcctttcattatgggctttttcagcatttcgggctatctgtcggccaatggtccatcttggtcggcgcggtcatcgtggctttaacctgcctgttcacgaggacgctcccgaaaatcggcgctatcttaaacatggtgctgatgggaatgtttattgatttcttctcgtttctgcttcctgaggcgcacgctttttccttagcggccgtgtttttttctatcggattgctgctgatcggctgcggcgtcggtatttacgtatcagcagggctcggcgcgggcccccgggactctctgatgatgctgatatctgaaaaaacgggctggaacgtgcaatgggtgcggaacggcattgagctgacgattcttgccgcagcctgggtgatgggcggaccgatcggcgccggaaccattattacggctgttttgacggggctgattctgcgtttttctttgccgcagtcctctaaactgttaacatacgcgatctccgggcgggcaacgtccgttcattaaaaacaaagccgaaacggttttgtttttttattttcggacagctttcgtctgatatggtaggatggttttgacaatattttcagacggaggatctggacatgaagatttacggagtatatatggaccgcccgctttctgcaggggaagaggatcggatgatggcggccgtgtccgccgaaaagcgggaaaaatgccggcgcttttaccataaggaggatgctcaccgcaccttgatcggcgacatgctgatccgcaccgctgcggcgaaggcttacggacttgatccggccgcgatttcattcagcgtccaggaatacggaaagccgtacatccccgcgcttccggacatgcactttaacatttcccactccgggcgctggatcgtgtgtgccgttgattcaaaaccgatcggcattgatattgaaaaaatgaagcccggcacgattgatatcgccaaacgttttttttcgccgacggaatacagtgatctgcaagcgaaacaccccgatcagcagaccgattatttttacctcctgtggtcgatgaaagaaagctttatcaagcaggccggaaaagggctttcccttccgcttgattcattcagcgtccgcctcaaagacgacggccatgtgtccattgagctcccggacggacatgaaccttgtttcatccgcacatatgatgcggacgaggaatataagctggccgtttgtgcggcgcatcccgatttttgtgacgggattgagatgaaaacgtatgaagagctgatgtaagcatagaaaaaggagggtatccccctcctttttttgtcagcctgatatttccgcctgtttctgcagctgctttgcttcttgataaatttcttcgaacagatccgcgatgtattcttcttcaacacatgaaaatgcgattcgcaaatcggtttcattaatggatatcgtcccgattcctctcttttcaagcaacgacactcttaattcgccggcgtttatgtctttcagccggacacacatgaaataacccgagttaaacggataaggcgtccatacgtcttcatagtgcttgttttctgcaagaacggctttcactttgtcagcccgttttttcatgatattatatttcagcgatttttctttctcgtattccggtgactgcatcgcccgcagcataaacgtttgggacggatgcggggcgcttgaaatcgttcccctgataatcccttttgttttttcctcgagcacgcgcagcgctttttcgctttttgtgctgtacgtaataaaaccgacgcggaagccccacgcgtaattttccttcgtcgcgccgtctatttttacgcaaagcacccggtcgtgcacttgggcgagtttgctgaagatggattcctgaatggccgtttcatcgtaaaacagattgtaatacgcatcgtctacgagcacgacaatctctttgccggcctccgctgcctccaggatcacactgacgatttctgacgcttcctcttcccccggcgtatagcctgtcggattattcgggaaattcagcacgacaatcgccttttcttcctgctttttcagcagctcggacagccccgccgcattaaaacgcccatcctgctgaaaaagcgggtacgtctcaatggatgccttgcgccggacaccgaaaatgaaattgtaatttccccaatatttatccggcagaagcagcgcatccccttcattgacgaacaagtcggcggcaatgctcagcccgtgtgttaaagcgtttgtcacgatcggcgtgctgatgtctttgccggctaatgaaggattttcgagacgcatttttttcagccattcctgtctgagcggctcttttccctgcggcggagcataatcgtagatatcatcggggttataggcggacagtgtctcttgaatatgggaaaagtgcatggactcgccttgtgaggtggcaatcccgatcgtggcattatactttccggccttggctttcgcttccgccgattgtgtcagcacccctttcggataaaacaactctctgcccaaatcagaaagcatatgaagcacgtgcgggttttcttcagataatgttctgttcagctcttttgctgcatcattcatgtacgacaatcccttcaaaattatattccatcaaatcataacataaaatttttgataaatgagaaaactcacgggcagattttgttacaaaaaacagacagcgaatgctgtctgtcatatcctataacaattggcctgcagtgctcctgttaataatctcatatattcgttccgccactttttcagtttcacttaatatgaacatgtggccgtccgaaaactcatgaaatacgggattgtcggcccattttttccatccgtccgcatctttgatacattttttatctttccgcccgttaaaaatatggacgggtgattgaatcatgtgagaatcagacggacggaagctttcaagcgcgcggtagtcggacctgaaagaaggcaggaaaaatgacatgacctccttattctccactaactcctgcggcattccgcccagctcgataatatgggcgagaaatttttcatcatcaagatgagacacttttttcctttcaacatgcggcggctgaatggctgagatgatcacggcctgcgggtaaatcccctcccgctcaagcttttgcgccagcctgaaagcgaccatgcctcccatactgtggccgaacaggacaaacgggcggtcaggatggagattcaactcctgcttgtataaactgacaagctgttcaaaatcctcaacggcggacatttgatttgttccgtgtcccggcggttccgcggcaagcatctcacactcaccttgaagataggtgtggagcgggcggaatgatgcggaatagcctcctgcgaacggaaaacagataagctgcgttttttccgtggtatcgaacgatttaaagagctggaccattggcgggcttcctccttttctatcgtgaagctgtcagcttcggatgttccttccttaggaattcgagcaaatatgccgcattcctttcgagacattctccctgaagcatttctgcgtgactgccgcagccttttttcacacggtattcacctgtcgtggcttcctcccacgaagcgagccacggcggcatcgcaaagtccggttctgacgttaatagatctatatccgcattgaccgtgccggtgctgacggtatgcacgaaataagaataaaacgcgtttgtttttttggcgagaccttctttgacggcttcgtcattcagcgcttcgttatcccggtttaccttcatcagcgcctggacatcgctttctacggtgcggccttccaagtcgctgacgccttgttttttataggaatcaaccatgatcagccgctccactttacgtccttcggcttcaagccgtttggccgtttcaaaggcgagcgtgcagcctgccgagtatccgaacagcttgaccggtccttccggctggagctgattgatcagctctgtgtagcgttcgatgcggttgtcttcctcgataaaatcaaacgcacagattctatagccggacagctgttttgccagcggctggtacatcagcccgtaaccgagaaccggcgggaacgcaaacagtgtgtcagactgatttttattcatgatggtgagatctttcattcctttttcttcaccgtgaagcagataaccggcaatgtctgcgattgtcgtcgcttcgaataacagctgcaccgggatgtccgtaccgagctcttttttaatgcgcgacgctgccgtcatcgcttttaaggaatggcctccgagcgcgaagaaatcatcatgaatcccgatctgctgtctgccgagaatctcggaccagatgtgtgcaatcgtttcttccgtcgcgtttcgaggcccgatccattctttcgccgcctgagcctgatccggtttcggcagctgccgtttattgaccttcccgtttgtcgttaaaggaagctcttctaagaaagtaaaggtttgcggcaccatgtaagcaggaagctgttttttcaagtgcctctttacgtcttcagctgaaagcggcgtccggttcacgagataggcgttgattgatgcatctccggactcatggcggtctgcaacaacgaccgcatctttcacacccgggtattcctgcagctgcttttcgatttcttcaagttcaatccggtgaccgcgtattttgacctggtcgtcaatacgcccggcgtattcaatcgttccatccggcagccagcgtgctaaatcccctgtgcggtaaagcgtttctcccggcttgaacggatttgggataaacgtttgcttcgtcaggtcgtgacggttcagatacccttttgatacacccattccgctgatgcacagttcaccgacagctccgaacggctgaagctggttttgcccgttaagaatataaatacttgcattgctgatcggctttccgatcggcaatgaggaaatggaatccggtatatcatgcacgacgtgagctgtcgcaaacaccgttccctcagtcggcccgtaacaattaatcagcttgccaggccccatgatctcaagcgcctttctgacgtgaggcacagacgcgcgctcacccccgaataacacacagcggagccccttcagccactcctctcccgcatcggtgagaagattaaaaagtgcggttgtcgcaaacatgacattgacattctcctgccggatcagatcagtgagccgttctgtatcaagcagtgtatgttcatctgcgataatgagccgtgccgcattcaggattgatgcgtagaaatcaaaagtaaatgcgtcaaaggcgtaattcgaaacagataagaacgtatcttgttcagaaaatgccatatagtctacatgcttgaccaatccttgtatattggcatgagtggtgatattgcccttcggctttccggttgtgccggacgtatacataatatacgccggatcatcgggatcaattgcggctgcaggatcgcttgcctgttcctcaaaccgtgcttgatcatcgatgatgagtgttgttcctgtatacggcagctgagccgctttttctttcatctcctgatgtgtcagcagacaggcagccgcactgtcagtcagcatatacgagattcggtcctccggcagcttcggatcaaccggcagataagccgctcccgcttttaatacgccgagaatgccgatcaccagttcaagcgagcgcttcgtgtacaacgcgacaacggtgtctttacccgcaccttgcttttgcaaacggcgcgcaagacggttcgcttcctcatctaattcgcgataggaaagagtctggccggaatacgtaagcgccggtgcatcaggatttacattcaccgcttccttgaaccaatccgtcagaggcttcgcctgatgagtctcagccggcgggtttaagccggtaagcagaagctctctttccttttcatcaacaagtctgatcgtattgacagggtgatccggcttctggatgagctgctgaatcgctgtgagaagctgagattttaagcgcaggataaacgcctcatcaaacacattcccgttataggcaagcttaatcagcatctcatcacctggagaagccatcaggttgagatcataattcgatttctcaaaaacatggacgtcctccatatcaaagccgttttcactgttctcttcattttttgcatcctgaagcggataattttcaaacacaataatatgatcaatcagctttggctgatcggcctggctttggatgtcatagagcggcacatattgatgaggctcagactgcagcgattgctcctgcagctgcttgagcaagccgttaaatgtggtatcctcagacagcttcacccgcctcggaacagcattgataaacagcccgaccatatgttcaacgcctttgatttctgcgggacgcccggaaacgactgtgccgaagatcaaatcgccggactgctggtagcggctgattaatacactccaaaccgcctgcagcgccgtactcaaagtggtatgctgcgattttgcaagctcggtaaatgcttttgtttccgcctccggcagtgagaagagcagctctttcggctcatagccgttctcttgtttctttctttgctccgcaaatgtcgtttgtccttcaaaatcttctaagtacccgcgccagtaatgcagtgatgcatgtttatcctgcttttcaagccacttgatatagtctttatacggtttgaccggcggcaggctgtacggcttttgttctcgcagggcattgtataccttaaacagatcctgcacgacgatgccgaagcaccagccgtccaaaatgatgtggtggtagctccacacccattcaaagctttcttccgattttttaaagatggctgcccgcatcggaatatcccgcgtcaaatcaaagcccttgatcttatcctgttctttgtattcattaattttggatgcttgctcgctgcccgttaagtgtgtcagatcgatttcttctatctgaaactgccgttttttcaatacgacttggaccggcctttttactttttcgtgaatgaacacggtacgaaatacatcgtaccggtccatgatcacattcatgctttcttcaaggcatttgatattcaagctgccttttactttcattgtcatttgttcgatgtaaaagctttggccgggattcaggagagtatgaaacagcattccctcctgcatcggcgacaaataatacatgtcctgaacttgatcttttttgaactggctcatctgctccgctccccccttctgttaactgtttttgtcacgttaaattctcctcaagcatgtcaaagatgtctcccatttcatccatctcaagatcctgcgcgctgaaatcgctcggcgtaaattctttctcctctttggccgtgcaatggcggatgatcattaaaagattgtctttaaaccgctgcatctgtgtttcgacggtgcttctttcatattcttcctgattgtatgagcaggaaatgacgaagcggccgcctgtaaccatcccgctgaagctcagtgcgtataacgcctctgactcttcgctgacttgacgtcccatatcatatggagacggctcaaaccattccgttttcacttcattgtcaaactgccccaagtagttaaaactgatttcaggcgcggcgcctttttctgtttcatcggatgacagataccggagaattccgtatcctacacctttatctggaacgcgccgcactgtctcttttaccgttttaatgacggaagagacgccgtcttccttgctgatctgcagaatcaacggatattgggccgtaaaccagccgaccgtccgtgaaatattgacgttcggtatgatttcttcccggccgtgtccttctaagttgatgccgactttgccgttttccgtccattcaccgatcgttaagccgagtgcgctgagcagaatgtcgttgatttccgttccgtacggatgatgaacatctgtcagcagctgtgccgtttcttcctcagtcaattcacatttcacggccgccgtatgtttgacgagccgtttgtccggatcatggtctttcggcagcggccggagctcttccgcatctgcctgcgcccaataatccgcctgctttttcagctcttctgattgcgcaaacgtgttcagcgcctccgcccaatctttaaaggagtgggttttttgcgggaggacgatgctgttttgctgctgcgcctgtttataacctgaagcgaaatcctccagcagaattctccatgaaaccccgtccacgacgagatggtgaaccgcgattaacagatgatcgccttgttctgtccggtattgctccgcttttaacagcgggccgttctccagatcaagactgccctgaagatgatcggcaagccgctgaatctggcttttcagcatatcctcgtccgttccgtacagatcaacgatttcaaagcttgccttgcattctgtgacagggaggtatgtctgaatgatgccttccctttcttcacggtaaaccatgcggagcgcatcatggtgttcaatcaatgcttgcagggttttttccaccaggtccggatcaaagccgtctttcgcgtgaagcatgacggattggttccagtggtgtttgtccgtgaagtttttctcaaagaaccagcgctggatcggcgttaactccgcttcgccttcgacaggtccctggtcggcctgcttgccttccgtccgctccacataagagacgagctcttcgatggtcgggtgctggaagagatctttcatctccagcttgtagccgtgctggttcaggcggctcgccatttggatgcctttgatcgagtcgccgccgagggtgaagaaattatcgcttacgccgatctgatcaagaccgagcacttcctgccaaatgtcggaaagcagcgtctccatctccgtttccggcgctttgtaagcggcgcttcccgcttcaatgtccggttccggcagggcttttttgtcaatctttccgtttgcggtgaccggaagctcgtccatctccacccagaacgccggcaccatgtagtcaggcagcgtgtctttcagcgcggctttgagcgcttcaatatcgtcctgccgaggcgcgacataggcgcaaagcgcggtattgcccgctttgtcttccaccgccgtcaccgctgcgtcatgaacgtccgcaagctgggcgaggcggacttcgatttctgaaagctcgatccggtagccccgcactttgacctgctggtcgatacggccgatgtattcgatgccgctctgcgcgttccatttgacgaggtcgccggtccggtacatgcgctcgccgggcacgaacggatctgcggtaaaccgcttcgccgtttcttcctcacggttcaggtatccgcgtgccagaccgcggccggccacgcacaattcaccggcaatgccttccggctgcacctgatcgccgtcgccgagaatataagctctcgtattggcaatcgcccgtccgatcgaaagcgatccttcctcaggattgatgacgccgcttgtcgcgacgacggtgttttccgtcgggccgtagttgttgacgatcgtgtacggctgtttcaccgcccgcttcagcttgtcgccgccgacgagaagcatgcggagagaggtattttccagctccataaattgttcggccagctgcgtcggcaggaaggtgatggtcacgccgtgctcctcgaaatagtgatttaagcgggtgatatccagccggatcgcttcgtcaatgacgtgaagctccgcgccgatggtccatgtcgggaacatctcccagatggaggcgtcaaaaccgaagcccgcgtatttggcgcttttatcatccgccgtcatggcgaatgcgtcgtgatgccagaagcacaggttcaccagcgcatggtgttcgaccatgacacccttcggctgtccggtcgttcctgacgtgtaaatcatataagcgagatgatccgccgttgtttcagtctgcgggttcgcttcatcgttttcatcaagcggcaggctcagaatggagcgtccgccgtcaagcaggatcgtttctcctgtgtagccatccggcacgtccagcgcttcctgtgtgagaagaagcttggcgccgctgtcctgcagaatgtagctgatccgctcttgtgggtagtcggggtcaatcggcacaaatgccgcgcccgctttcaggacgccgagtacgcccgcggccatttccaaggacggtttcgtcaaaatgccgacacgttcgtcagccgtgacgccgcagtctatgagaatgcgcgcgatccggttcgcccttgcgttcagctcgccgtacgtccatttcgcgccgttatatgccgcggccggccggttcgcgtatcgggcggccgtttcttcaaagagacggtgaaccgttttgtcctgcggcacagagagtgtttttcctttccatgcgtcaaggagggcttgtttttcagcatcgctgatcagtgaaatctcaggcagctttctgtccgggctttccgccgcttgcttcagaatccgcaggaacccggcgctccacttttcaatggtttcttttttaaacagatcagtcgcatattcaaactgaaggccgagaccttcttgatccgtaaagccgccgagtgtcagatcgaatttcgccgtgccttggtttgactcatacggagtgatgcgcaggttctccagttccagtgtttctttatccggatcttctgtcgtcaccatcacctggaacagcgggttgcggctcatatctctcggcaggtcaagctttccgatcagatcctcaaacggataatcctgatgcgccagcgcgtcgagattggtttgtttcacccgttcgagcagcccggcgaaggtctgctctttttgcgtttcattgcgaagcgcaagcgtattgacaaacatccccggcatttcctgaacttcggcgctcgttcttcccgcggtcaccgaaccgataatgatatcgcgctgtcccgtgattttgctcaaaaagacatggaacgcggcgtgaagcaccatatgaagagtcgctcccgatgattccattaattcacgcaccgctttttccgtctcacgccccgctctgaaacggacggattgtcctttaaaactttgaaccggcggacgcggaaaatcggtcggcagattcaattcaggaagctcgccggaaaatgccgagagccaataacgctcatggtctttcatccgttcggcctgcccgggttcattctgccagacggcgaagtctttatagtgcaggttcggcgacggcagacttccgcctttgtaaaggtgagcgagctctttgaccagcatgcttctggacacgccgtcggcaatgatatgatgcatatccagcagcagcaggtgtttcttttcattcagtctgacaagagcggcccgaatgagcggagccgcgctcagatcaaacggcttaatgaatgcctgaatgataagatccgccttctcctcgtccgctgcttcaaaaatgtgcaggtcaatgtcagcctgttctgcgatctgctgcatcggctggcctttttgatcgataaaggacgtccgcaaagattcgtggcggttgatcatctgattgagcgctttctgaagccttgaaatattgacttctccttccatcagaagaacggacggcatattatagctgattgtctcccggtcaagctggttcagaacgtacatccgtttttgggcggatgataacgggtacgcgtctgcactgtctgccggtgtgatcatccgatatccctcagataccgccgatttttcgatatatgcggcaagcaggcggacagtcggctgttcgaacagcgcttttaacggaaccgttttgtccagttcagcctgaatattggcgaggagcatcattccttttaaagagtgcccgccgtaatcgaagaaattatcgtcgatgccgagcgtatccgtaccgagtgtctgtttccaaatgcggcacagcttttcctccaattccgtttccggcaaggctgaagcaatttgcgccgtttggctgacgcccggtttcgggagggcgtttttatcggtttttccgttggctgtgagcggaatgcggtctacttgcacgaaataggccggaagcatatgagacggcagtgtttcggaaagccgtttgcgaagctcagagcctttcagcccgctgtcggctttatagtacgcgcacagttccggcagcccgccttcgctgactgcgagaacgaccgcctcctgaatgccgtttacgcttaacagcacggtttcaacctcttttaattcaatgcggtagccccggattttcacctgatcatccgcacggccgataaattcaatcgtcccgtcaggaagcctgcggacgatatctcccgttttgtacatcaggctgtccggtgaaaaaggttttgagagaaatttctccgccgtcagctgcggacggtgaagatatcctctggcaagccccttcccggtaatataaagctcgccgcttgcgcccggaggaacgagctgcattgctccgtccaatacaagcgcgccggtatttgcgatcgggcggccgatgacgggacgctgctcatattgatcaagacgctccatattgatccgttccgcaatggcgccgatcgtcgtttccgtcggcccgtagtgattgatgaagtcggtatgggcgtatacgtcatgaaacttgcggacatcggacgtgatgatcttttctccgccgagcaccactaaacgaagcgagctgaaacggcgttctgacgtaaaacgggctgtattgacgatcatatggaacaatgacggcgtcagtttcatatacgtaatgccgtttttctgtatatactcaccaagctgatcaggcgcggtgtacgtctctttcggcacaatgtgcagctcgccgcccgcctgaagaatcgggaatatggccgtatagccgagatcaaatgcgtaagaagacagcagcacggatttgtcagcttcggtcaaaccggcttcacggctgaaccatgtgacataattgattagattgcggtgttccagctggacgcctttcggtttgcccgttgttcccgaggtataaatgatataggcaagccggtcggcgccggactccgtttcaagccggtcggcgctttcgttctgccattctccgtcttccattacgaccgtttttcctttataaacggcggccgcggtcatgtttctctcattgacgaccagaagcttcgttccgctgtcttcgagagagtagcggattctctcttcaggagtctccggatcaatcgggagaaatgccgctccggctttcatgacgccgagaatcgcggtaatcaagtcggccgaacgatccatcataatggccacgatgtcctcactgcccgttccgcaagcctgaaggtgtcgggcaaaccggttcgagcgttcatcaagctcacgatatgtcagacttgttccgcccgcaaccgccgtgagatcaggcgttttctgcgcttgccgttcaaacagcgaaacaaaagtgccctcaggcagatccgcttccgtccgtttttcatcagaaaggagcgcttcccgctcaggagcggacagcaggcttgcgtcggccagctgaatatccggattttcggcgcaggctttaatcagattgacaaaatgagcgctccagcggcggatggtttcgtccgcaaataaggctttcgcgtaatcaaagctcaatccgacctcttctccgcgctcagccgcttctaaggaaagatcaaatttagcgacatgatgatgcatggagtaagaagaaatctccaaatctccgagccgcagggccgggatctccatgttctgcatattaaataacacgctgaacagcggactccggcttgtgtccctcgttaacggcagtttttcaattaattcttcaagcggatagctttgatgctcaaaagcttgaaggctcgccgttttcacttcatccagaaattgcttgaacgtttttttgccggcaggatgcgaccgaagcgcaactgtgttgacaaacatgcccggcacgtcttggagatcaggatgctgtcttccggccgccggagacccgactatgatgtcttcctgccccgaatatttggacagcagcacttgaaaagcggctaacaagaacatgtacatcgtcgtatccgtatcagccagcagcttcttaatctgcgccgtcacctgtttatcaagcccgaagatgacgcgttccccttcaaaactgcgctcggcaggacgcgggaaatcaagcggcagatccagcaccggcagatcgcctttgaacgtatcaagccagtaagcttcgtgctgatcaagatttgctttttcacgctgccagactgaaaaatccttataatgaatctttggcagctcaagctccgtgccttgataaagcttcgcaagatcaccgatgaaaatgcccattgagcttccgtccgtaataatgtggtgcatgtcaatcagcagaagatgccggtcttctttaagccggatcagcttcgaacggaccagcggcgcacgattgagcgcaaacggcctgataaaggcttttgtcagctcttctgcatcttcttcccggccctcggcggtttcaagctcaaacgacacatttttatgaatggtctgcacgacttctccatctgccatgtcaaacgacgtacgcagtgtctcatgacggttgattaatgcctgcatggcctcttcaagacggtttttgtctactgatccttccagcagaagtacagcagggacgttgtagctcgtgctggcctgtccgagctgattaaggatatacatcctgcgctgtgctgaggaaacaggataatgcttctgataaggcgcttgtcggatcggttcaaactgctgttcctcctcggtctcatgctccaaataatgcgcaagctcctgaatggtcggcttttcaaataacactttaatcggcacttctttttgaaagtgctcctggattttagcggtcatcatcatggcttttaaagaatgtccgccaatcgtgaagaaattgtcagtcacacccgcttttacaccgagaatgccttcccaaatgtccgcgagtttctgctccgcttccgttttcggcgcttcgtattctttttgaacggcttcagcctgaggctcaggcagcgcttttttatcaatctttccgttcgccgtcagcggaaactgattcatctggatgaagtgcgcgggaatcatgtattccggaagtgattccgaaagcgttttgcgcaggtcttccggcgaaagggcttggtctgcggtaaagtaagcgcagatttcattttcatccgctttatttttccggatcacagccgcagattccgtcacattctccgcctggctgattttcgcctcaatttcgccgagctcgattctgaaaccgcggacctttacttggttgtcaattctgccgagaaactcgatcgtgccgtccggaagccacttcgccaagtcccccgtccggtatatcgtttcatccggtctgaacggatcgcggacaaactgcttctccgttaattcaggcagattcacatagcctcttgccactccgcttccgccgacacacagctccccgggcgcgccgatcggctggaggttgcggttttcgtccataatgtacgcagtggaatttccgatcggcttcccgatcgggatcgaaccgtcgtagtcctgatcaatgagaaaactcgtcgaaaacgtcgtattctccgtcggcccgtagccgttccaaagcgacagctccggtgatgccttcctcactttgctgacgatatgcggcacaagcgcatcaccgccgatgatgaggtgccggagcgtgttaaacatgccggcatccttttgggcaagctgattaaacagcggagacgtcagccacatggtcgtgatccgctgctctttcagaaattgggcgaatcgtccggcgtcaagcagcgtctcttttttcaccgggtgcaatgccgctccgttcagcaatgcgccgaagacttcaaaggttccggcatcaaagctgacggctcccgtttgcgccatccggtcttcttcatgaaccggcacgtaattcgaaggtttgacgagcctgatgatatttctgtgttcaatcatgacgcctttcggtttgccggtcgatccggatgtatacatgatatacgccaagtcgttgccgccggccgggagattcaagtctgttccgcttaccgtttcatccgcgctttcattcagcatgacaatcgggacttgcaatgtgcccgcttgttcttgatagtcctgaactgtcagcacgagccgaatcgagctgtctgccgccataaagcggagacggtcctccggaaaagccggatcaatcggcacataggcgccgcctgcttttaggacggcaagcattccgataacggtttccgcagaccggtcgttcataatagcggcggtccggcctttttccagcccgctcttcacaaggtgtctcgccaggcggttggccgcttcgttcacttcacggtaggtccattcgcgtccctcttcttttatcgcgatgcttgcaggcgtccggtttgcctgtgcttcaaacaaacggtgaacggcctcctcttccggaagcgccgttttcgtatcattgaatatctcaacaatctgccgctcttcttcgcctgaaacaaggccgagttcccgcacgggcgcgtcaggcgttccgaccgccgctttcatcatgcaggtcagatggtgcgccgttcgttcgatggcatcatgtgcgaaagccgctccgttgtatttgattttgacggtccacgtttttcccggatacacgatgagattgaaatcaaagctcgtctgctcaaaagcatgttcaactttaatggaaaagccgagtctttcctccatgcccccgttttccagctctttgtccagcggatagttttcaaacgcgaccaaatgattcaagaggctgccgtccagagcggagcgcttttgaatgtcatagagcggcacataatcatagcgctcggcttccacggcgtttttctgaactgccgccatcacgtcagaaaaggctgcatctttgtcaatcttgattctgacaggaatcgtattgatgaacagccccgccatcgtttcaatgccgttgatttctgaaggacggcctgatacgacggtgccgaacaccacatcgtctgtatagttgtatttgctgagcaccgcaccccaaacggcctgaaacaggttaggccccgtgacttgatgccggttggcggtctgctgaatctgcgcgaccagctcttcatcccagacaaaagaatattcttcattttggtagtctttcttttctgatgccagacggcccgggagcaggctcggctgttcgaaatccgccaggcggctgctccaatattgttccgcctcctcataatccctgcctccgagccatttgatatagtcagagtaaggtttgccctggcttcccccggcgggccggccggcacgaagcgcttcatagttttgaaacaggcttttcatcaaaacgcccatactccagccgtccatgacgatatgatgattgctccagacgagatacagttccttctcactgagcctgaacaccgccgctttaaagagaatatccttcgccagatgaaagccctgctgctgcacatcgcgtttatagcgttcaatatattcggtttggcgcgcttcatctaattgactgatatcttcatagtgcaccttcgtcttccgctctgctaatacgacttggcgcggtttttgaagctgctggtgcacgaataccgtacgcaggatgtcatatgtccgaatcagctcattgacacttttttcaaaaagctcaagctgaaagcttccgtgaatcctaagctctaattgtgtgaagtaggaggaagaatgcggatcaagcagcgcatgatacagcattccctcctgcatcggtgtgagtgcatacaccttttgaatcgattttttgctcatatgtcacctctgtcttttctgttagagaatttccattaatttatcaagttcatcaagcgtcagatcatcatcgccaagatcgctaggcgtaagctcaggtccgtcttgggccaggcagtgatctatgattttcaagaggtgccctttaaagctgtcactgaacgattgaatggttttttcatgaaattcgagagaatgataggcaaacgtcatcgtcatctgcccattttctataaatccgacaatatcaagcgcattcggcttctctgtgtcagggctcagcgattgtcctgacggcatcccggatcttgtaaataagccggaatccgacatctcattaaactggcctaagtagttaaagctgatatccggatcaatctcaaatgaaagaccctctttatgctcaggcgccgttacataacgcagaatgccgtagccgactcctttgttcgggatgtgtctgatgtcttctttcatttgtttcagctgatatgaaagatcgtcggcgtgcttcatctcaaggatcatcggatacatgctcgtaaaccatccgaccgtccgggtgatattcaggccgtcaagaatgtcttcgcgcccgtggccttccaaatgaacgccgatcgtgtcttcacccgtccactctttcagcgccagtccgagcgccgtgagcaggatgtcgttcatttccgtatggtaggcttcatgtacgtttgtcgtcagctgttcagtttgttcaggcgtcagagagaaactgaccgttctcgtatgtctcatgcgctgatcgccagactgcctgtctttcggaagctgagtgcatacctctttctcctcaagccccctccagtaatccgcttctttcagaaacgccttcgtatttgcgtattctttgattctctcagcaaattcggcgaatgaatgtgttttcggaggcagcgccggttcattgccttgtttcagctgcgtataaacggacgtgaagtcctccagtaaaatccgccaagatacaccatccacgactaagtgatggattgcgagaagaaggtggtctccatcttcagcccggaagagcccggccttcagcagatgtcctgtttccagtgaaatactgctttgaagacggtctgcttcccgttcgatacggtcctcatgatcttcagcaggtccgttcagctcaaagacgttcagttcaacagacgcatcctcaagccctctgtaatacggtttttgttcacgataaatcatccggagcgcatcatggtgcaccgtcaggacatgtaatgttttttctgttatctccggatcaaagccgtctttcgcatgaagcatgacggattgattccagtggtgtttgtccgtgaagtttttctcaaagaaccagcgctggatcggcgttaactccgcttcgccttcgacaggtccctgatcggcctgcttgccttccgtccgctccacataagagacgagctcttcgatggtcgggtgctggaagagatctttcatttccagcttgtagccgtgctggttcaggcggctcgccatttggatgcctttgatcgagtcgccgccgagggtgaagaaattatcgcttacgccgatctgatcaagaccgagcacttcctcccaaatgtcggaaagcagcgtctccatctccgtttccggcgctttataagcggcgcttcccgcttcaatgtccggttccggcagggcttttttgtcaatctttccgtttgcggtgaccggaagctcgtccatctccacccagaacgccggcaccatgtagtccggaagcgtgtctttcagcgcggctttgagcgcttcaatatcgtcctgccgaggcgcgacataggcgcaaagcgcggtattgcccgctttgtcttccaccgccgtcaccgctgcgtcatgaacgtccgcaagctgggcgaggcggacttcgatttctgaaagctcgatccggtagccccgcactttgacctgctggtcgatacggccgatgtattcgatgccgctctgcgcgttccatttgacgaggtcgccggtccggtacatgcgctcgccgggcacgaacggatctgcggtaaaccgcttcgccgtttcttcctcacggttcaggtatccgcgtgccagaccgcggccggccacgcacaattcaccggcaatgccttccggctgcacctgatcgccgtcgccgagaatataagctctcgtattggcaatcgcccgtccgatcgaaagcgatccttcctcaggattgatgacgccgcttgtcgcgacgacggtgttttccgtcgggccgtagttgttgacgatcgtgtacggctgtttcaccgcccgcttcagcttgtcgccgccgacgagaagcatgcggagagaggtattttccagctccataaattgttcggccagctgcgtcggcaggaaggtgatggtcacgccgtgctcctcgaaatagtgatttaagcgggtgatatccagccggatcgcttcgtcaatgacgtgaagttccgcgccgatggtccatgtcgggaacatctcccagatggaggcgtcaaaaccaaagcccgcgtatttggcgcttttatcatccgccgtcatggcgaatgcgtcgtgatgccagaagcacaggttcaccagcgcatggtgttcgaccatgacacccttcggctgtccggtcgttcctgacgtgtaaatcatataagcgagctgatccgccgttgtttcagtctgcgggttcgcttcatcgttttcatcaagcggcaggctcagaatggagcgtccgccgtcaagcagaatcgtatctcctgtgtagccatccggtacgtccagcgcttcctgtgtgagaagaagcttggcgccgctgtcctgcagaatgtagctgatccgctcttgtgggtagtcggggtcaatcggcacaaatgccgcgcccgctttcaggacgccgagtacgcccgcggccatttccaaggacggtttcgtcaaaatgccgacacgttcgtcagccgtgacgccgcagtctatgagaatgcgcgcgatccggttcgcccttgcgttcagctcgccgtacgtccatttcgcgccgttatatgccgcggccggccggttcgcgtatcgggcggccgtttcttcaaagagacggtgaaccgttttgtcctgcggcacagaaattgtttttcctttccatgcattgaggagggcttgtttttctgtttcattcaccaaggaaagctcagaaagcttcgcagccggattttccgttgcggcttttaacagttgaagccaataatgcttccacgtctctgccgtttccggtttaaacagcgcggtgttatattcaagcacaaacgttaagccttcgtctgtgtcctcagccgtcatcgtcaggtcaaacttggctgtttttctgtcaaacgggtggtgcttcagctcaattccttccatgaccagatcttcagcatttgcattttgcattgagaataccgcatcaaacagcggatttcggctcgtatcacgctgcacctcaaccttttgcagaaggtcttcaagcggataatcctgcgcgtcaaatgcatgtaaagcggtttgtttcacttctttaagatagtccgtgaacgttttgtccgcttccggatacgtacgcagcgcgagtgtattcacaaaaacaccgatgacgtttgcgagatccgcatgtgaccgtcccgcaaccggcgagccgacaatgatgtcatgctgtccgctcagttttgagagaaaggcgctgtacgacgccagcagcaccatgtacatggtagaatccgtttgtttcgcaagactgcgaagagccgacgtctgttcctcagtcagagaaaagaccagcttgtctccttcaaaggtttgcacggccggacggctgtaatcagccggcagcgtcaataccggaagctcgccgtcaagctcccgaagccaatgctcctcctgcttgcggtactgctctgattgaataaatttctgctgccataccgcatagtctttataatgaatccgcagcggctcaagcgtttcgccgccatacaagcgggacagttcatctatcagcacgccgactgaagcgccgtccgaaatgatatggtgcatatcaaacagcagcaggtggtcatgttcagccagcttgaccagccccgttctgacgagaggaagctgatccagacggaacggccggataaagctctgaataatccgttcagcatcttcttcagaggcttcataatattccatgtcgatataagcttccgcccatatacgctgaaccgtttctccatcctttatgtcaaatgtcgttctgaaggcttcatggcgttctgtcagctgtttcatgacggatttcagcttttctgcatcaagctttccttttaaacggagcacagacggcatgttatagcttgtttcagcgccttccagctgctgaagcacgaacatccgcttctgcggtgaagaaaccggatacgtttcccgctccgcagccggtgcgatgctctcagccgccttccgctcagccccttcaatcagctgcgccagcccagcagccgtcggagaagtgaacagatcctttaaggtaagctgcacgccgaatgtcttctggataagggccagcagtttcatccccgctaacgagtggcccccgatctcaaagaactgatcatggacgccgacccgttccatttgcagcacctcagcccaaatatccgccagtttttgttctgtttcattgcgcggcgccgtatatgacacggcattcgctgcggtcacatccggcatcggcagcgcccgcctgtcgatttttccgttccctgtaagaggcagttcatccaattgaataaagacggacggaatcatataagccggaagatccttcgccgtatgctccctcagctcccgggaagatatttccctgaggccgacaaaatacgcgcaaagaagtttgtcacccgcgccctgatccacagcgagcacaatgcattcctgaatctgatcatggctttgaagctgatgctcaatttcgccaagctcaatccgctgaccgcggattttcacctgatggtcgatgcgtccgataaactcgatatcgccattcggaagccatctggccaagtcgcccgttttatacatccgttcaccttccttaaacggatgctttacaaatttttcttccgtcagttcaggacggttgtagtagccttctacgagaccttccccgctgacgcacagctctcccgcgatacccgccggctgaatgcgtccggctgagttcataataaagacttccgtattgctgaccggtttaccgatcggaacggagagcgtatcctcttcaatgacatccaccggatggtatgtcgcaaacaccgtgctttccgacggaccgtacatatgaagcagttttcctttcccgactgccgccagcgcctttttgacatgttctacagacgctctttcgcccccgaacatgattttccgaagcgtcgtcagacaggacggctccatatcaacaagcaggtggaacagggccgtcgtaatcatcagaatgctgacgttctcccgtttgatcacacgggacaggcgcgacatgtccagcaccgtatctttcgggacgatcacaagctttgcaccgtttaacagcgaaccgaacatatcaaacataaaagcgtcaaagacgtagtttgacagaccgagcactgtgtcctcttcagaaacggtcaaatagttcgtgttttttaccgtccgcaaaatgttggcatgtgtgacgatgtttcctttcggcgttcccgtcgtgcctgatgtatacgtgagattggcaatcgttttggaatcaaacggcaatgctggattgcgagagtccttttcatagctcgcctcatcatcagcaagcacaatgacgccttgaaaaccggccttttccgcaagcggcttgaggctttgctgagtcaggagcacattcgccccgctgtcgcggaagaaatgctgaatccgctgaaccggatgctcaggatcaatcggcacataggcggaccccgcttttaacacagccataatggaaacaatcatgtccattgaccgttcacataaaacagccgcggttttcccgccgcctccgaccgaaagaatatgccgcgtaagcctgttggcgcgttcattcagctgctgatacgacagagtttccccttcgaactgaagagccgtccggtcagggttctttcgggcctgttcttcaaagatctgcacgatcgtttgctctttcgggtatgccgtgcgctccggattgaaccgctgtaattggttcaaagcctcccgttcagaaagcagatcatattcgctgattttcgcatccggctgagctgccgcactctccagcagacggacatagtgcgcaagcatgcgatccgcagttgagcgcttaaacagcttcgtgcaataatccaaatcgagcgcaatgccttccgctgtttcccgggcctgcattgtcagatcgaatttagcgatattgaagttggtttcatgaagagacagcgtcaggttgccgatctccggaattccgtccgaagcattttgcagactgaacatcgtgtcaaatatcggatgcctgctcatgtcccggggcacgttcagctcctcggtcagccactcaaacggataatcctgatgggaaaacgcgtccagcacctgtttgcgcacatgacctaacaagccggcaaatgtctgatcctgcttcacggagcttcgcagcgcaagcgtgttgacaaacatcccgataagcccctcggtatcagagtgatttcttcccgctgacggtgttcccacgatgatgtcttcctgtcccgaatacttagaaagcagcgtatagtatgccgataacagcaccatgtaaagggtggctccgtttttctcggcaagcttctgcagccgttcccgcagcattttcggcagcttggcggacacgcggtcaccttcaaagctttgcacctgcggccgcggataatcagggagcagctgaagcaccggcagttcgccgctgaagacttctttccagtacgcccgctccttcttgtagccttctttcgcccgttccgcctgccatacggcataatctttatattgaatgcgcaattcaggcagctgatttccgccgtagatgtcagccagttccttcagcatgatggaaatagacaccccgtcagaaatcaggtgatgcatatcaaacagcagcatatggcgattgtgaccgagcgtttgcaggccgattctgaacagcggcgcctcagataaatcaaaacggcgcacaaagtccttcatgacctgttcattcgttcttccgcgcgcttcgagcatttcaatatgaaacggaacatgttcgtgaaccacctgtctcggcgtgccgtcctccgattgaaacgatgttctgagcgcttcatgcctgctgattaaggcagaaaatgcacgctcgagcttttcaaggtctaaagcgccctcaatcacggccgcagccggcatgttatatccgactcccgcatcttcaaattggctcgcgatataagtccgctgctgagcgagcgaaagcggatagctcgcctgcttctcagccggctcaatcgccctgaatgccggtccttcgtttcggttttccgcataatcggcaagcgccgcaatcgtcggatgctcaaacaagtattgcagcggaatttcaacgcccatttgcttatgaattttcgtcagaagcgtcattgcctttaatgaatgaccgcctgactcgaagaaatgatcataaatgcccgccttgtccattccgaggacttcctgccagatgacggtgagcgtttcctccgtttcgtttctcggcgcggcatattcggatgagctgacagcctgcacatcaagcgcaaacagctttttgcggtccgccttcccgctcggcgtgagcggaatttcgtccgtttttgtaaagtaagcgggcaccatgtaatcaggaaggtgcttggacacatactccctgtactcggcagggtgaaactcggttcctttttcctgaacgatatatgcgcaaacatctaagctgccctgctgatccggccgtgccagcacgacggcctgcgccgcccccggagcttttctgagcaccgtttcaatttctcccagctcaatacggtagccgcggactttcacctgatcatcttcacgtccgatatattcgatcgtcccgtccggcagccagcgcgccatatcacccgtgcggtacatgcggccgcttccgttaaacggatcttgcaaaaacttctctgcggtcaaatccggaagatttaaatagccgcggcctacaccgtcacccgcgatatacagctcaccggccgtgccgtcgggctgaagccgctggtgcttatccaatatatacagacgggcgttgccgagcggttttccgatcggaacgtacgccgcctgttgattcattccgttatcggcggacacctgatgcacggacgcatctacgcacgtttctgtcggcccgtagacattcgtcagacgcggcgccctgcccgattgatgaaagaggttcatcagctgttcagcaacagcggcggacaggccctctcccccaatgagcatgtggcgcaattcaattccgctgacatctcccgccgcaaccatcatctgcagatgcgcaggggttccgtcagtggcttcaattcggttttgacgataatagtccagcagtgccgagccattcgttacagtcgttttcggcacgatataaagcgtctgtcccaaaagaagcgaggcaaaaatctgtttgacggacgcatcaaaatgaaacggagccaaaagcgccattcttaatgtctgctcaccgcattgataaatctcctgctgcagtgattgcaccagatgatgaacttgccggtgctcaatcatcacgcctttcggccgccccgttgtacctgacgtgtagatgatgtaagccagccggtctgattgtgtactgacaccgtccgcagccgtttcaaactgaacagcctcgtcaaaatcaatccgttcggcatccgctgcaggcgcctgtattccggcctctgtcagaacagccttcgctccgctgtcctccaaaatgtactgaatccgatccgccggaaagtcaggatctatcggcacataggcgccgcccgctttcaaaattcccaatattgccgcaataacacgctcagaacggccaagcagcaccgcgacaggagaatcggctgatatcccggctttaagaaggcgtccggcaattcggcctgactgttcatgcaatgtgcgataggacaatgttcggccttcatacaccaccgccggtttgtcagacagtgacttcactttctcttcaaacagccccggtatcgtcatctccccgcggtaattcaccggattaccggaggcccgtgtcagcagccgctctttctcggattcagaaagaagagtaagctcatcaattatgcgatcaggagatgaaatcgcatcttcaatcagcgtgatcaaacgttcagaaacagatacaatctcctctcccttgaatatgtcgctgcgatagtcaaaatcaatcgtcaatttcccagtgtcccatcgttccttcacatgaatcgaaatatcatttgtaccgcttccgctgaaaatagggtctgtcaggaaggacagattctcttttttctgccactgcatcacctggtactccagagccaccgtaaacaatctgctcagcgaacttttcgaagcgcgcaaatcattgacaagcaggttatacggatacttttggtggcggagaattttcatcagatccttcatccggcctttaacgaattccaagaacgactgtcctccgtcaacgcttgtccgcacaggaaccgtagatacgaacatcccgagcatctgcttttctttcgcattcgtccggtttcccataaacgtacccgtgacaacgtcatcccggccggtcactttgtagagataagtgatcaaagctgattggaacagagatagtacgctgactttatgctcctcgcagaatgaatgaatgcggccgtataagtcgtgaggaatttcttgagaaaaccgtttcgcatcaagacccgcatctgcctggctccgtttcagggacacaagctccggcacggtctcgaactgcccgttccaaaaatcccgatcctttttaaaccgcttcgactgcacatattcctgctcagtcagcacatgctcgataaaggaaggaatctccgtctgttccatacttgctccgcccgaaagctccaaataaatatcagtaatcgcattgcccagaatcgtcatggaaatcccgtctgaaataatgtgatgcacattaacgtaaaaccagacctcattttcgctgatggtatacacggaaaaacggaataaatcctgatcatataatgccagaggcttgcttgcctcgtcacgtccccattttgacagctcttccgcagagcagccggcttgcctgatgtctgtatgttcgatagtcagcggacggtaatcgctcacatattgaacgggctccccctcatcatcaagccgcagacggattctcatcgactcataccgccggacgaattcctgtatcgctttctcaacgtaatgagcctgtacgccgtcgtcagaaatgagtttcccgaacccggcaagatttgaaatacttgtgttcggatagaatttttctgtataccagatacgtttttgagcatttgttaaaggataaaaagttatttccatatgtgtgcgcctcccctttttaagataaaattgtcaattctcccttagaaacagcctccctcaatgtccctaactcattatcaagccaaaagaaccacttacctccaaaacgatcccgattcaatcaccgccgaaatccgcaatccactcacccgcacagtccgaaatgcggctcaaatttatgagaaatcaagacaagaatccaatgtttgtaagcaacagggtttacctatttcttcatgaattactatatatctacttacgttcactttatatgaaattattgtttttatcaccgaaaaatgggtgaaaagtttcattcggcacaccgaaaaaaattccgacaattccagagggtattttgcggcatcccgcaatttatttttaaaaatattatttatgtaaaattaaaaatctttaaactatagtataaatctctcgaatatccagttatggcagaatgaaaatagttttcatatatgagctgatggggaaaaaacagcgcaagaaccgaaacaggagatttaatcgttcgcaatatgatttcattaaaccgcaaaaaaagcactctattttacatagagcgcttcaaaaagattcctttattgcagttttatcaatgttgattaattccatatattcttttccccacttatacatggcgtccaaaatcggcataagggtctctccttgctccgttaatgagtactccactttcggagggacgacagggtaaacctccctgtgaacgatcagatcctgctccagctccctgagctgattcacaagaattttgtgcgtaatatccggaattaaagctttcagctcattaaaccgctttgttccttcttttcccaggtgccacataatcagcattttccacttcccgcctatcacggcaagcgtcaattccttttcgcaattaaacgttttctcatccattcggctcacgggccattctccttcctcttactttttgtacgttcatcatctattcatacacgcttacttttttacacaactttcatcagtttatactaccacgcagttttgctgaaacaaagcgcattgcctgcggggacagtatcctcaaagtaactattagacttcaaagtgcgtacttctcaacatgcggggcactctatagaatgtaaatacatgaaaaagaggagtggatataaagtggaattacagctggcattagacttagtgaatatcccggaagcaattgaacttgtgaaagaggtcgaacaatatatagatgttgtagaaatcggcactcccgttgtcattaatgaaggcctgaaagccgtacaggaaatgaaatcagcctttcctcacctgaaagtgcttgccgatcttaaaatcatggatgcaggcggctacgagatcatgaaagcggcagaagcgggcgccgacatcatcaccgttttaggagcgacagacgactcaacgatcaaaggggcggttgccgaagcaaaaaaacagcagaaaaaaattctcgtcgacatgattaacgtaaaaaaccttgaaacacgggcaaaagaaattgaccaactcggtgttgattatatttgtgttcacacaggttatgatcttcaagcagaaggaaagaattcattcgaggaactgacggcgattaaaaaagcggtcaagagcgctaaaaccgcaattgccggaggcattaaacttgatacgcttcctgaagccatcaaacaaaacccagatttaatcattgtcggcggaggcattacgggagctgacaataaagcggatgctgctgctaaaatgaaacagctgatttcacaaggatcatgaaaacgactgaatacttacatgaaatactcaatgaaatatcccgcaccgcagcattaatagccgacagtgaagctgacaagcttgcagatgagattttatcggcagatcaaatcttcacgtccggagcggggcgttccggctttatggctaaagcgttcgccatgaggatgatgcacatcggcctgaacgcttacatcgtcggtgagacgcttacccctcccctccaagaaggcggtctcgtcatcatcggctcaggctcaggcgaaacaaaaagtctgcttcatacagctgaaaaagccaaaagccttaacggcatcatcactgcattaacgattaaccccgattcaagtctcggcaaacttgcggatcttacgataacgattcccggctctcctaaggaagagaccggcggagacagaaagacgattcagccgatgggttctttattcgaacaaactcttctgctgttttacgatgcggttattctaaaaatcatggagaaaaaagaactgaattcagcagacatgtttacaaagcatgcgaatctggaatgatttactgacggccttcttatcagatggccgtctttttatcgtcttgttgcgcacggtcatgcaggccaaggttttcgggtcggacactcgcagacgaagatatcctgccggtgagcttatcgctataataagtcaattgacgatacggccgcaaccgttcatttctgaatagggaaacggcaaaaaacactttctgatcggatatttaatgaataaaattgatttgtgcggatggttttacagatattcagctgaattgcggctgagaaatatattttaacagctttacagccggccgattctgctttattcttggaccagctttacagcaatttaaaactggaggtgattgatactcttgaaaacattaaaagcactgctgcttgttcttatcatcattgccggagcagtcgcggccctgatcaagggtgatcttttctcagataacgagcagaccgttcagaagagtgattacgacaaagtaatcctatttccgtccgatcgatatccggaaacagcaaagcatattaaggacgcgataaaagaagggcattccagcatatgcaccattgacagagacggagtacataagcggcgtgagcaatctcttaaacatgtgcctgtcaaaacgggatacgatagggatgaatggccgatggcggtttgtaaacagggcggaaacaatgcctccgtagaatatatttctccggcagacaaccgcggagccggctcttgggtcggacaccagcttaccaatgatcccgacggaacgagagtattatttaaaatcaagtaaaaaaacaggaggaacagcgcattgaataaatcatggaaaccgcaagaactggccatttcgtatcatcaatttacaatcttccaaaaagattcagaaccgcctgttatcgattggaccgatgaagccattgaaaaaggatatgcggaagctgacggagctgtttcattcgaagcaaggagaaatacgagggcatttatcgtcttcaggcttaacacaagtgaaccggtactatcctatgagaaaaaagcgactgttccctttgaggctgtaaaagatggaattgagattgaaagcgtgatgtcaaagcggcttttctttaatattccgaaaggccgatacagccttacctgttattcagtgcctgccgaaatatccgatcttcatgcggatacgtatattattgatgcagacgcaatgtaaaagaaacccctgagagaatcatatttctctcagggaacttttataaacttttaccgtttgtttcaattacattctggtaccaataaaaactgttttcctgatccgtttcaagtctttttcatcttcttcatctcgattgatatacacaaaaccgtagcgtttttgatagccgttcagccagcttaaacagatccgtgaatgaccagctgcagcagccgatgagatgaactccgtcactaatagcctctctgcacagttcacccatactgaaggtcctttaccgtcttattccaagctccttcaacctgataggcagccgaagctgacccccatagaaatgtatcagggaacagaccctgttttttatgtatcatgtgtttcatcctcctgatgcgtatgatattgatatcatacgttttgaaacgcatttcagagcaatcccgataaaaacaaaaaagcatccggcttgccggatgcttaagaatgatgatgccgcttttccaatttatgaggcggaggcttcgggacaaagccattttgtttcatcatattaaagcgcctgtccatatgctgtttaatatgttctgctttttctttcggcaggaccccgtactcaacatatttggatatgacatgtttgcgtttttcgagcacttctttttcaagtgattcaatttcttttttctgctgttccgtgagtgacattgttgaaggcatttttgtttcggcgtgtgccggcattgtgaaaaccattgctgtaatgaaaaacgcagctaaagacaatgcagcttttttcatgactctttcctcctttaacgtttgttatatgttgctccctcatccattttttatgcaaaaaaagagcgaaattattcgctcttttcaatcgattcgtccggcagtgcgtatgtgacatacgttcccgctacaaaatcgtggattgaccgtttgtcttctctcattccgaccatgaatgcgctcacgatcacaccgattccaaacgtcacgccatatatcaggccgcccacaagcactctcaaaatcatagtaagaaagcctgcctggtttccgtcttttttgacgatgcggataccgcagatctttttgccgataacataaccgttccagtatacagggagcaaaataccataaagagtcaaaatgatgctgatcattgcgctctcattcgggtcttttcctgttgccagcataaaaataatcgccaaaggcactgaagtaattaaatagtcgagtacaacggctcccaatctgatccaaaatcccgccggtctgtaaatattcatcatgtttcccctcgctatggcttcaaaatcactttaatgtcgccatcttcttttttgtcaaatatatcatatgcagcaggagcttccgcaagactcattttgtgtgtaatgatatccgtcggatcaatttcattttgttcaatcatttgatacagcatcggcatcagatgaataacgggtgcctggcccatttttaaagaaacgttgcgtgtaaaaaaatcaccgagcggaaagccgtccgcttcagaaatgtatgcgcccgtgagctgcacggttccaaacttcttaacggcttctgatgctataagaatcgggctgatcgttccgaactgattcggtttttgctctgctttttcttttgaaagcggcgtgccgtccattccgacacaatcaatcactacatccgcgccccctgacgtttgttcatgcagcagtttcccgatctcatcatgttctgaaaaattgaaggtctctgctccgtttatgcgtctcgcatgttcaaggcgatgcgggacttgatcaactgcgataacccgtttagctccttttttccacgcgaatttttgcgccattaagccgatcggacctgatcccaaaataacgactgtatctccttttttcactccgctgtgctgaacgctccaaaaggcggtcggcatgacatctgacagaagcagcacctgctcatcttcaagctcactgtctgccggaaccagaaaagaagagaaatcagcaaaaggaacacgtaaatattcagcctgcccgccgggataattaccgttaaactccgaaaaaccgaataaaccgccggcatctgtatgaggatttggatttgattcatcacactggctttccatctggtgcttgcagtaatgacattctccgcagccgatgttaaaaggaatcacgacacggtcgccttttttcagctttttgacttgactgcccgtttcttcaacgattcccatcggctcatgcccgacaatataacccggatcggcgggtattccgtttttatataaatgaaggtctgaaccgcatatcccggttgcggtgattcgaacgatgacatctctctcatcttgaatggcgggtgccgggacttctttcacttccatatgttcttttccttggtatgtcaatgctttcacacttggtcagctcctttttcatcactccttcccttttcacctgcttctaaacttggccggtatgttattcggcccgctgaatatcccattgaaaaggatcttcaagctgcgaccaatcagaatcgaactcagactgcgtgagcaggcactgatccaattcctttgtaatggcggcttcatctaaatctgttccgataaacaccaagttcgtatgacgatctccgaattggtcgtcccaatcttccagaatctccggttcctgctttttgatctgctcctgctcaagtttcggcattgccgccacccaataagaaacaggctcaatcgaaaccgccggacccgcctgagacatcagcagcgcaaggctgttgcgggttgcgcaccaaacaattccttttgcgcgcacaatgttgtcaggcattgattgatgcagccagctgtcaaaacgaacggtatgaaacggcagacgccgcgagtacacaaacgaagtgatgccgtactcttccgtttccggagtgtgcgcttcatgacctgccgtcagttcctttatccatcctgctgatgaactcgcttcctcaaactcaaataaaccggtattcaatatgcattcggcgggcacttctccgcgaacggaccggatcagtctggcacggggctgtaatgcgcgaagaaccgtttccagctgttcaagctctttttcgcccaccatgtcgcatttatttaaaatgagcacatcacaaaactcaatttggtcaattaataaatcggcaatctcccgttcatcctcttctcccgccgcttccttccggtcaagaaggctgtcaccggactggaaatcatgccagaagcggtttgcatccaccacggtcaccattgtgtccagcctgcagaatgttgtcagatcaatgcccatttcttcatctatataagaaaatgtctgggcaactggaatcggttcgctgatccctgttgattcaatgacaatataatcaaacctgccgtctttcgcgagtttctcaacttcgactaataaatcttcacgcagcgtgcagcagatacagccgttggataattctacaagtttctcatccgtccttgacaaaccgcctccctgcttcaccaagcccgcgtctatatttacttcgctcatgtcattgacgatgacggcaatttttaaaccgttgcggttttgtaaaatatgattcaaaacggtcgtctttccggcaccaagatagccgctcaatactgtaaccggaatttttttcatatcaatagccccctgataaaatagaatgattacgatttatatctcgcaactgccttattttcatcatgatgtacatagttttaaatcgcaatcgttactatttattttgatgtattctccgtttaaaatcaagtaaaagtcagacacatcacacgttgtttgtccccatccattggtctgacacgcaaaacgtcaacgatttaattggtgaagccttggatccggactgtaaaatgcccggttttaagatgtgtgcggtacgaatcatccctatctaattttcataaaatttttagattttttcgtattttttgttacatttcataacatgcatcttaaatatttgtttttgctgtgctacgctgaaaaaaacaaagataaggagcggatcatctgatgggaaaaaaacagctagtccttgttggaaatggaatggccggggtaagagcgattgaagaaatactgcgtgtttcaaaagacgaatttgagattacaatattcggggccgaacctcatcccaactataaccgaatccttctgtcaaaagtgctgcaaggcgataccgacattcaagacattacgttaaacgattggaactggtacaaagaaaacaacattcagctgtataccggtgaaacagtcatcaaagtcgacacggaaaaccaaaccgtcatcaccgatgcagacagaatccagccttacgatgaactcatcctggcgacaggctctgtcccttttatccttccgattccgggcgcagacaaacaaggcgtcacggcattccgagacataaaagataccgacacgatgctcgccgcgtcaaaacaatataaaaaagcagccgtcatcggcggaggactgctgggtttggaagccgcgcgcggactgctgaatctcggcatggacgtgtctgtcatccacctcgccccattcctgatggagcgccagcttgacgcagcggcgggacgcctgctgcaaaacgagttagaaaaacaaggcatgacatttttccttgaaaaacaaaccgaagaaattctcggtactgaccgtgtcgaaggcgtacgctttaaagacggcacaagcatcgaagctgatctggtcgtcatggcggtcggcatccgcccgaatacacagcttggcacagaaagcggcatcccggtaaaccgcggaatcattgtcaacgattatatgcagactgaaattccgcacatttacgcggtcggtgaatgtgccgagcaccgcggaatcgcgtacggtcttgtggcgccgctctatgaacaggcaaaagtgctggccaaacatatttgcggcattgaaacaaaaccgtacgaaggctccgttctctccactcaattaaaggtatcaggcgtcgaggtcttctctgccggcgactttgatgaatcagaggacaaaaaggcaataaaagtgttcgatgaacaggacggcatttataaaaaaatcgtcctgaggggcaatcaaattgtcggcgctgttttgttcggagacagcagcgaaggcaaccgcctgttttctatgattcaaaaagaagcagatatctctgaaacctccaaaatatcaatcttacagcctcttgatcaggaagcaggcgtaagcatgaccgcggcgatgagcgacgatgaaatcatctgcggctgcaacggcgtttcaaaaggtgccattattcaagccattcaggaaaaaggctgcacatcaacggacgaaatcaaagcatgcaccggggcatcccgttcctgcggaggctgtaaaccgctcgtagaagacattcttcaatatacactgggctcagaatttgactcatccgcgcaaaaagaagcgatttgcggctgcacctcactgtcgagagatgaagtcgtagaagaaatcaaagccaaagggctctcacatacgagagaaatcatgaacgtgctcggctggaaaacgccggaaggctgctccaaatgccggcctgccctcaactactacttaggcatgattaatccggctacatacgaggatgacagaacatcccgttttgtgaacgaacggatgcacgccaatattcaaaaagacggaacatactcagtcgttccccggatgtacgggggcgtaaccaactctcaagatctccgcaagatcgccgatgtcgtcgacaaatatgagatcccgctcgttaaaatgaccggcggccagcgaattgatctcatcggcgttaaaaaagaagatctgccgaaagtatgggccgagcttgatatgccgtcaggctacgcgtacggaaaaacactccgcacggtaaaaacgtgcgtaggcgaacaattctgccgcttcggcacacaagactccatggcactgggtattgcgcttgagaaaaaattcgaagggctcaatacgcctcataaggttaaaatggccgtgtccgcctgcccgcggaactgtgcggaatcaggcattaaggaccttggcgttgtcggcatcgacggaggctgggagctttatgtcggcggaaacggcggaacccatttgcgcgccggtgatttgctgatgaaagtaaaaacgaatgaagaagtcttagaatacgcgggtgcttaccttcagtactacagagaaacggcaaactatctggagcggacatccgcatggcttgagcgcgtcggtttatctcatgtccaatccgtattaaacgatccggaaaaacggcaggagctcaacgacagaatgaatgagacactctctgtccacaaagatccgtggcaatacttccttaaagataaaaaagcttctaaagatctattcgaaaatgtcgtcacgacttcataaaacagtaagggggaacggacatggttaataaagatatgacaaaggtttgcataggcaatgtaaacgaattacccgaggagttaggaaaaaccgtatatatagaagataaagagcttgccgtatttaagctttctgacgggagcgtccgcgccgtcgaaaaccgctgtccccataaagagggcgtcctggctgaaggcatcgtcagcggagaatacgtcttctgcccgatgcatgactggaaaatttccttagaagacggaaaagtccaagagccggatcatggctgtgtcaaaacatacgaaacactgatcgaaggagagaatgtatacctcctgtattgatcaaagaccggatcacttttccaagtggtccttcattttttaaattgctgaagggatgacgccatcatgaaaaacggaatcgtatactttgtcggtgccggaccaggagacccggggctgatcaccgtaaaaggaaaacaggctctggagaaagcggatatcattttgtatgaccggctcgcaaacccaaagtttctagaatacgcctcaccggactgccggttcatttattgcggaaagctgcccgaccgccattttatgaaacagtctgagataaatgccctgctgatagaaaaagcggcggagggctacaccgtcgtccgcttgaaaggcggagacccaagtgtgttcggcagggtcggcgaagaggcagaggcgcttcatcagcacggcatccgctacgaaatggtgcccggcatcacctcgggaattgcagcgccgctgtatgcgggagtccccgtcacccatcgtgatttcgcttcgtccttcgcgatgatcaccgctcatgatacatcattgcacggcaggccgaatctcgactgggaagggcttgcccgaagcgttcaaacgcttgtgttttacatgggcgttaaaaatctgtcatttatatgcaggaagcttatggagtacggaaaatccccttccgttcccgtactcgtcattcaatgggggacgtggggacggcagcggagcgttaaaggaacgcttcaggatatccatgaaaaagttcaaagccaaaacatcaccaaccctgccattatcgtcatcggtgatattgtcaattttcaaacacacagctggtttgaaagcaaaccgttcatcggacggcatatcatggtggtcactcatggggatgatgaacatacattgacagacaagctgcgcgagtatggcgccgatgttattgaatggccgaagcggatcgttaaaaaaatgcccgcaaacgaaaacatcctgaaacagatcagcacctttgaacaactatttttcacatcacgccttgcggtatgcgaattctttgacacactggctttcaagcagatcgacatccgccgggtgaccgcaagcctgaatgcagcgactgaagccgcaaagacggaactgacaaaacggggctttctcctatccgaatggcaaaatgattctccgcattctctcattgtagggagccgtcaagcagcagaaaacttgccagactcaaaatcatgcctgttttatatcacccatgaacatatcgcggatgagcgattcacttccatgatcgaacgcacgatcagtgagtcacctctgcaaatgattatctgtacgggcaaagaatccgctcagcatttgatcagcgccggaaaacaaatcggcatatcaccgaacccgagaggaaaccgccctcccgtcatctgcatgggcgaagacctccccgccggctgcgggtttaccgccgtgaaaaatcaggaacagttatttgcgtttatacgaaatgaaatgaaagacatgctcgttcacagctgatacgccggaatgcttttctgacccccggacccagcatcggggggcagcccttttttattgtgtcaccaattttttatgatgagtcgaatacatcgccatctgatccgcatgcgggtccaaataggctttggcgctgttcactgcggtcggcccctccgtgaaaccgccggcaatcagtctgagcttgctttcataatgggcggcgtcaccggcgacaaacacgcccggaagattcgtgcgcatatgcctgtcagctttaatcctgccttcttctatctcaagcccccagtccttcatcggaccgagatcaattttaaacccgtggttgataatgagctcatcaagcttgatgacttcagaaagtccggactcagtttggcaaacggtgacgctctcgatccgttccccggtgccgttgagatgcttcagacgatacggcgcaagcacccgcacggaagaccgcttcattttcgccacgctgctttccaaaccgccaaactcctcacggcggtgcaagacggtaacagacgccgcaatcggttccagctcattcgcccagtcaaccgcggtatctccccctccggaaatcacgacatgcttatctcgaaacgcatcaagcttctccaccttataatgaaggttctttcctgaataacggctcgcatccgcgctgtcaagttcattgacctcaagcgtccccatgccgacggccaaaatcaccgtgcgcgtatagtgcttttccccttcggaactttcgagcacaatggttccgtcttccagccgttcaaatccggccacccgctgattcaacacgatatccggctcaaatgtcgccgcctgctccttcagctgcttaatcagctgttccccggcaatcccgggtattccgccgatatcacggatgattttttcaggaaaaaacatagacacctttcccccgagccgcggcaaaaactcgatcactttcgttttcagctcccgcatcccgcaataaaaagccgcaaacaggccgatcgggcctccgcctataatcgtgacgtcgtacacctcatgattttccgccatcgttctgcctcccgtttatatctatacttcatacttttttaattgagaatcaatatcaatgaaagtataacatatattgaggagcagtgtttattcatttctcatcttgcgggaaaggagtgattcagaagtgaggttctgagattgataagcgggaaggtattaaaactgaaaccagtacggcgactggtttcttttttatctctttttcatcagcatgatatcgagatacagctggcaccttgtcctgaagtcgtttaaattaattgatgtcatgtcaagaatctgtttgatgcggtagttcaatgtgttttgatgaataaaaagctgttctgcggctggttttgttttgcagttattgaggagatagatttctaacgttttcagcagttcggtgctgctttctctgtctttggcttttaataacgctaaatcatcgtttacatattccagtgaggcgtttttttcttcgatgctttcaagatagcggtaaatcccgagcttactgtattcgtacgggatattttcctggtttccggtaatttcggcggcctttataacttcaagggcttctatataacttttgccgagcttcaggatgctgctgtattcattgccgattccgatatagatgggagtggggatcttctgaaagtgaaaatgagtcagcagtttgtggatgaattcagatgctgccgaagtgccggagcttttttgcgagaagcttgcgacgacgatgacaatattggaatcaatggttaagacgtggctgactttatcccgcaaattcaagtacgatttgatattttcctttacatcttcgactgcctccccatccccatttgcggcgtgcaggacgactaccgaaaaaaccgacggcagcacggcgttcatcttttccgcttcccgcctgaactccttttcagaggagaattgctgaaagatcgcccgtttcaccaggtcttccgctctctcttctttttcctgtttcagccggttcgttttgtagatgatttttccgacatggaatgaagtttcatataaaaaatcgagctcctcgtccgtcaagtttcggtcgagctcctgaatccagatgtagcccatcacttcccctttatgttttgcgcttacaaccactctctgattcaatccgatactgtctattttttcgacacggaacggttcaggaacggttttcagcttttcgatcaccccgtccttcagaaacctttcaaaaatctgcacggggcatttttttgagaatatcgtctgctggttggcggagtcgaagtgattaatgtaataagaattataggcaagcaaaaagaaatccgcgctttccagaataacgggcttctgcaattcataactgatgaaatcaattaatttatcaatgtccgtaaatgaaaaaactctctctaaaagctcttccatacctatttctcctatgctctttttatctttatcatactctgaggggtgactttttgtatagaaaaaaattcatatactcccaaaacggaatgatccgaaagcctgtatcgtgaaaagaggaaaaagggcggtcccttcttcctctcgttccttgcttttattgagaaagtgtatcacggtagtcatgaaactgatctgtgacatcttttgacggagcctgtgtcaataagctgacaacaaatacagcggcaaggcttacagcaaagcccggaatgatttcgtacaaaaagtctgaaagactggcattcgcccaaatgattacggtaatcgctcccgcaatcatgccggcgagtgccccccatttcgtcatccgtttccaaaataaactgagcagtacgaccggcccgaatgaagcgccgaatcccgcccatgcatagctgacaagaccaagtatcgtgttgtttttctcccaggcgagcaccaaagcgatgattgacaccgcaagcactgccattctccccagaaatacgagttccttatcagaagctgaacgcctgaacatggacttatacaaatcctctactaaagaactggacgtaacgagcagctgagacgaaatcgtactcataatggccgctaaaatcgcagaaatgagaaatcccgtaataatcgggtggaacagaatgttgccgagctgaataaaaatggtttccggatcagccagcttcaacccgcgctggtggtaatacgcgattcccgcaagacccgtaaacagcgcgccgagtgcagacaaaatcatccatcccattccgatccgtctggcgcgtttgatctctttcacagatgtgatcgccataaaacgcacaataatatgcggctgcccgaaatagccgagcccccacgcaaataaagaaataatgccgaggacggtcgtccctttgaacatattaaacagttccgggttgacggaacggatatcggcaacggtttcccccgggccgcccgtatggaaaatcgtcacaatcggcacaagaataagcgccgcaaacataatgatcccttgaacaaagtccgtccagcttaccgccaaaaagcccccgaacaaggtgtaggcgacaacgacgcctgtcacgacccacagtcccgtgtggtaattcaaccctaaaatgctgttgaataagacacctccggacaccatgccggatgatacgtaaaaagtgaaaaagacgagaatgacgagacccgaaaacagtctgagaagcttcgtatgatcaccgaaacggttttcaaggaaacccggaatggtgatggaattccccgctttttcggtatacgttctcagtctcggcgcgacgaaaagccagttcgcccacgccccgagcacaagtccgatcacaatccaagcgccgcttaatcccgttgagaacatggcgcccggaagccccatcaagagccatccgctcatatccgccgcccccgcgctgagcgctgtgacggcagggcctaaagaacgccccccgagcatgtaatccgtcagatttgacgtccgtctgtaggcaaaataaccgataaacagcatgcccgccatataaatacaaatggaaataatcaactgaatgtttgctatggcatttcctcctccgctttatatgtttatggtgaaatggacaccccccgcgaggaggatgcccattcagtccctcttaaaacatttcactgattgttttcgcctgcatgtgaagggccaaataatccgggccgcccgcttttgaatcagtgccggacattttgaagcctccgaacggatggtagccgacaatcgctcccgtacaattgcggttgaagtacaggttgccgacatggaattcctgtttcgcccgttcaatatgtttgcggttatttgtaatgaccgcgcctgtcaaaccgtattcagtattgttggccacttccagtgcttcatcaaagtttgatactttagaaaacgccacgaccggcccgaaaatttcttcctgcatgagtctggctttcggatcaaggtcagcgaagatcgtcggcttgataaagtagccttttgaatcatctccggtgccgccgcttactaaacggccttcttcttttccgatttcaatgtagctcatgatcttgtcgtaagaaccttggtcgatgacaggtcccatatacacgtcagcgctgtcagggcttgccgtcacttttgattcagtgatttcgatgacgcgctctaatacttgatcatacactttttcatggacaactgcacgtgaacctgcagaacatttttgtccagcgaagccgaatgctgatgtaaagatggattgagccgccaattcaatgtccgcgtcctcatcgacaacaaccgtatctttaccgcccatttcagcgataacacgctttaagtgctgctggcccggctgcactttcgccgcgcgttcgaaaattctcgtaccgacttcacgtgatcccgtaaacgtaatgatgcttgttttcgggtgatcgacgagatagtctcccacttccgctccgcttcccggcacaaagttgacaacgcccttcggaagacctgattcctcaagcacttctacgaacttcgccgcgatgaccggtgtcgcgcttgccggtttaagaacgaccgtgttgcccgttacgatcggtgccaccgtcgttcccgccataatcgcaaagaggaagttccatggcggaatgacgaccgttacgccggtcggtgtgtagacatattggttcttctcgccttcgcggctgttgaccggcttgccttttgccaattcaaccatctggcgcgcgtagtattccataaagtcgatggcttccgccgtatccgcatcagcttcattccaaggctttccggcttccttgacgagcagggcggagaattcgtgctttctgcggcggactttggcagccgcgcggaacaaaacggcagctctttcttcaggggatgtgtatctccactcttcgaacgctttcgcagccgcttcaatcgcctgctcagcgtgctcctgggacgcctttgacacttttccgacgacttcttctttgtctgcagggttaatggatacgattttcgcttccgtctctaccttttcaccgttgatgacgagcggataatcttttcccagatactcatttaccgtcgcaagcgctttcttaaattcttcaacgttcgattgatcttggaaattcgtgaatggttcgtgtttataaggtgtagtcattgtcatctctcccttttttacttcttagtcattcctttaaaggcgaatgcgatgtttgaggggcgctcggcgagccgtctcatgaaatagccgtaccagtcatccccgtaaggcaggtagactctcatacggtatccttcttccaccaggctgagctgggtttgcgagcgcatgccgtacagcatctgaaactcaaaacggtcgtttggaatgccgtgctcttcggcaagctgttttgtaaactcgatcattttgtcatcatgcgtggcaactgccgtataatgtccttttaaaagctgtttgcggatgagtcttttataattttcatcgacgtcgcttttttcaggataggccaccttttccgattctttataggcccctttgacaagccgcagaaacggattcagcgggctgaggtcatcaagatccttctccgttctgtacagataagcctgcaccacggtgcttacatattcataccggctccggaagtctttaaagatatccagcgttttctggcatctcgtttcatcttccatgtcaatcgtcaccatgactttatgtttttcagccgtctggaggattttcgtcatattttcatagacgagatcaagatctatatcaagacctaaagacgtcatttttaatgacacttgggaattcagctgttcatcagcaattaaggcgatggtctgcatgcactcctcggtgcgttctttcgcaacgtcaccgttgttgacaaattcccccaaatgatcgacagtaactgacagcccctggctgttcaaatgtcggattgtcgggatagaactgcggaaatccattcctccgatgattttgccggctgccacacggcttccccagcttcgcgccatcttattgagaaagctgctcttggataaaaataagaaaaaatctcttgtaatcacttccaaccttaacaccccgcaatctaagaagtatttgtatgagtctattgtaaatggacaaaacatcctctcacaatattctaaaaatacaaagattctgataaatttttgtggttttaccacaatcagcttcttagatagcaggcggattatgccgaaaaaaggcggacggaaatgacggcaatcgtcaatttccgcctttttccccccacgcctcttcgacggtctgaatcaatagctgattcagttcctccgttatgtcaggtttcggtgttttgatcgttttgacatagtgcccgatgcgttctatttcttcttctataaacgcgtgaatgatcatatttctcggttccggagccagctcctgaccgctttttttccttgtaagcagtgtattgatttcagaaatgagcgcttcatccgtcaataaggcatcggccagtacgggaaatgacatcggcggtacggagccgaacgtttcaatccatctgcaggcaaggagaggacgcaaaacataaaaatactttttaatcttcacttcactgccctgcaattccgttttttcattccgttttgccatattgagataatgataaatgccggcttcaggcgaaaaggcgcggattttcagttttcgaagcttttcagccgctgagaaagcttcataatagatcatctcagaagagagccattccaaaagaggcggatttgattttttaaaaagccgcagcgcttttctcagttcccagccgctgatgtcaagcatgtcatgaatcggctcttctatgacatccctatgcggttcgatcgaaaagtaccattcttttttcggcacatagagaaaccgcacatcgtagtcgctgtcgcttgacggaaatccccatgcgcggctccctgattctacggcgtaaagcaccttgacgccgtgctgtgcttcaattcgttttaattcttcgatgatcctttgttccatctgtatccgtccttttccgtgatcattcctgaaaaaagcccaagtacttgggcttttcgctgtcgtcagcctttcagatgcgctttcagaaaggccagcttttccttatggaaagaaggtatgtattcatgtccgaaataccggtaaaccttcaattctttttccgtttccagatgattgtaagcggcaaacaccgtcgacggcggagtcacgcggtcaatcagcccgatagacatgagcaccggaacttttacgcggtccgccagattcatgatatcaaaataggccagtgtattcatcgcggccttctccgtctcagggctgccgttctttctgaaaaaagagttaatctcaagatacggctcatcaagagcgacatcaatggcccgctcaaaattgcttaaataaggataatcggccgcaaccgctctcggaatgtcagatagtgccgccgcggcgattgaaagtccgcctccctggctccccccgatgacggcgattctcgtctcatccacttcatcaaagccgctgatgacttccaaagcccggacggcgtctaagtacacgccgcggtaataatatgtatctttatctaaaatccctttcgtcatccagccgggaacgtgtccgtgcggtgagacgcttgtatctgtgctgctgtgctggccgcggacaagcatgccgaacgcggcatatccgtgaagcgcccaatttacgatgtcatgtatatctccgtcataactcgcgttgtagccgtgatatttcacgatggccggatgcggtccttgccggtcgggaacggcgtaccatccctcaatttccgccttgccgaagcttcggtatgtcagccggaatactttcacgccgtcagccgggtagctttcagccgtcaattcaggctttgcctcttcctttgcaagctcatgtaatgatgatgcccaaaaatccgaaaagtcatgaggagcggttttatttggtttataggtttgcagttggtcgagcggcaagtcgtataattgcatatccgattattctcctttgttttataagatttaattttctgactctatcttaacacgattttacactcattttctaaacattttaataaacgtttgtttaaaagaaaacaaaaaagccgtacgctcacagcgtcacggctctttttacatcggctgatacagatcccagccgatttttaacgtttctacgatataatcggcgatttcttctggttccagattatccgtcgccacttttgaattatgtttatcatagatgctttggcgctcgttaaagagctgctgcatttcatccatggaacggttatgcagaacgggacggctttcaatcagcaggtcagcccgctgcttccaattctcccatgataaatcaagatggagcacgagacagttttcgaggcagcactgtctgattgcctcttgtttaaacgaaccgcccccaagcgacacgatcttgaatttcgtattgcggcagatatctaatatatagtccttttcagtttgacggaaaaaggcttcaccttttttctcaaacatttcagggatggacatattgaaatctttctcaatctgcaaatcaatatcaatgaagtctctgtataatttcttagcgaccagctggccgattgttgtctttccgacacccatgaatccgatcagtacgatgtttctttctcttacgggaatggcacgttttgcgttcatcttcggcgaaatcctcctaagaaatgaaaaagttatgtttattatatgataacccaatattgaaatatagagataatgcaataaaagaaaacccatcctttataagaagagatgagtttttctttctatcggagcgtaatgcgttccacctttccgacaatgaaaatataagaaaatgccccgataaatgcgacagcgccgacaaacagaatcgctccgttatatgaaccggtcgcagaaacgataaacccgatgataagcggggtgataatgccggccatattggcgaaaaagttaaacacgcctcctgccaatccgattgtttcgcttggcgccacctcactcagcatcgtccaggatatattggacatgccctgcgcaaaagaagcaatggataagatcgtcaaaaccgcaggagcagaatccgtaacattcgcgagcacgatggagcctgtcagcagaagaccgaggatgacgggggttttccgggcaacgttcaccgacacgccccgtttcatcattccgtcagaccaatatccgccgaacaatacgccgaaaaaggcggcgatatacgggattgatgcggcgaagccgacttttaagaatgccatgtgctttgcctccgccagataagtcggaaaccatgtcaaaaagaagaacagcgtggaggctacggcgaattggccgatatacaagccgacaagcttgcggtatttaagaagctggacgaaatcccgccacgtgatcctgccggctgattcagacacctctgtcagtccgccgccttctctaatataatcaagctcttcccggttcactttccggtaccgattcggctcgtgatacattttgaaccagaaaacggagaaaacaagcccgagcacccctgaggaaataaagacggcgcgccagtcaaatgccgttaacacccagaataaaaccggtgtggcgaacgccagtcccacatattcccccgccgtataaacacccgtggcaaaggcgcgttcccgccttggaaaccatgtcgtgacaatccgattgtttgccggaaacgcaggcgattcagccagcccgataatcaggcggcagccgaataaaaatccgaaactggctgcaaaagcctgcactccggtgaaaacagaccagatcattaaagaaacgccgtacgtccgttttgacccgaatttgtccaaaatgagcccgccgggaatctgcatacccgtataggtccagctgaatgcggaaaagacgacgcccaaaagcgcggggcttatgttcagcgatgtctgaatggacggggcggcgatggatacactggcacggtctatataattaatcgcagtgataaaaaacaaaagaaacagtatcacataacgagcgcgagtcggtttattgcggacgggactgaagtccgtcagctccgtttcatttttcaatggcttctccccccttactcgaatgaaattaattgtacaacacttcggtcaattatttaatactttgacgcaaaaaagcgctaaacaatttgtgcgccgcactgacactccgcttataaaagtgtctgcccttttcacctgtttatccgtatctcacccggggaaaagtacacatatgatagacagttacgggaggattaccgatgaaactgagtttttgcacgacaggatttaaaaaaaagcatattttcgacatcatttctttcgcgaaggagcactcctttgacggaatcgaactgtggtacggacacgctaaacaatatatagaggaaatcggcccgctcgacaggcttgatcagcagcttcaggaggaaggcctcggggtgcctgccgtcagtttgtacactgacttcgccgctcaggatgaaaggcaggcgttaaaggatgttcaaggggcattaagcgcggcacgacagctgcacagccccttgatcagagtctttgccggcaatcttccttcgcatcggacgtcaccggaaaagtggcaacgtgcggttgatcaatttcagcaggcggcacggctcgcagatgactatgaagtcgatatcgggcttgagattcattacgatacgtacgcggatacaccggaggcggcactggcatttttggaggatgtcggacatccgcgggtccgcaccatttttgacggctccaacctacacgtcaatcacgttgaccaaatgtccgctttagaaaagctgtatcataccgtcagccatattcatctgaaaaactatcactggaattttgacaactggtatctcagcaagccaactccgattttccaaggagatctcgatcaaaaagcatttttaaaagagctgatgaacagacaatatgacggttttgtttctcttgagtattttggagaacatgcctttacgcatataaaggaatcgctccgggaatatacgtctgttttttcccgctgactcttcgatcgaagggtcttttttttgtatcatatagaaaaagggggatatcatgatgatcatttggataaatggggctttcggttccggaaaaacacaaacagcgtttgaactgcacagaagactgaaaccgtcttacgtatatgatcctgaaaagatggggtttgcgatgcgttcgatgataccgccggatatcgctgaagatgactttcaaagctaccctctgtggcgggaattcaattacagcatgctttcctatttgtcagatacatatcagggcatcatcattgtgcccatgaccattacgaacgatcaatacttccatgacattatcagcaggctgagacaggatggccggaccattcaccactttaccctgctggcttcaaaggaaacattgctgaaacgcctgcgcaccagagcggaaggaaaaaactcctgggccgcaaaacaaatcgaccgctgtatcaacagcctgtctgatagcctcttcgcagaacatctccatacagaccaaatgtctattcagcaggccgcagaaacgatcgctgcccaagcaaatctgcctcttgagcctgattcgagaggcagccttcgaagatttaccgacaaattaatggtgaagctgaatcatatccgtatcaaataaaaaagcgttttgaaaacatgtccctgacccatgcaaatggatcaataaataaaaagtccctccgaagggatgtttttttcaatttaagaaaaaaattttagaaataaaggaggaattatatggataatcgtctaattattaacactgtaatacatttcatttgaaaagggagtgttcgaaatgaaattcaaaaaagtgttaaccggttctgcgctgtctcttgccttactgatgtctgccgctcctgcctttgccgcatcaccaacagcatccccatccgtggaaaatagcccaatctcaacgaaagcagatgccggcattaatgccatcaagcccgttccaagccctaacggtattttcgctgcttctttcgaactgaatggtacaacatggatttttaaatacaaatactatgacagcagcaaagggtattgggtagggatttatgaaagtgtagataaataaaaatgaaataaacaaaaaacctccctttcaaaagggaggtttttttcattctatttccaccaatcatcaaacatcgatgccggcacctggcgcttgtgctccgtactgaggtagcgtttttccagcgcttcaatcacttcggaagaaacatccttgccttctaaataatcatcaatgtcattgtatgtgatgccgagctcggtctcatccgtctgctgcggtttttcatcgagcagatcggccgtcggtaatttcaaatacaggcgttccggcgcgccgagttcttctaataaacgtctgccctggcgtttcgttaatccggtcagcggcagcagatcagctccgccgtcaccgtatttcgtgaagaaaccggtcaccgcctcggccgcatggtcggttccgatgacaagcagcccctcttgtccgccgatggcatattgagcgatcattctcattctggcttttacatttcctttgttaaagtcagacagctgatcgcccgtgtcttttttatactgatcagcgaacgcgctgacagcggacttaatatcaaatgtccatgatttatcaggtttaatgaatttgagcgccaattgggcgtcatcctcatcttgctgtgtgccgtgcggaaggcggacggcgataaattcagcgtttccgccttcttctctgatgctttcagccgccaattgggcgaggcgtcccgcaagcgtggaatcctgccccccgctgatgccgagaacaaagcctttggcacctgtttttttcaaatattgtttcagaaagttcactctgtcctcaatttcttgtttcggatcaattgagggttttacatgaagatcattcataatttgtttctggatgctcatcccaatcactcctcctgcattgtttctttatgattcatttcccgttcatactgaaaatgaatcatgccactatgtacgactctttgttaaatatagcacaggtgcagtttttaagtgaaccaaatacaccgggatcagctgatttccacccgcagcgccgtgatgctgtccccgttgcatttccctttttcgatcggacaggatgaaaacgcgacgacgagatccatttccgcacggagccgtacataatcacccgcgtcagaaagaggggtttcgactgataagttccccttctcatcgagcaccgtgttcataaagatggcaaatgggtaatgcatatgcggccgcggcaccccgaacggttcaagcgccccgctcatattgtcatagcacgtatcctggagctcgtccttatgctttccgtataaaagcctgttcatatccggacggcaggcgggaagcagcaagtcgtgcttgccgactgtatcctcaatcagcgtcagcatcggcttgtataaatttgaataaatatgatcacctgtttttacatgaatggactggttggcatcgatcgtcgcgccctgatcaagatgttcataaaagtccttggcatgatacgccgtaaaatcagccacctgctgcccttccacatcgactacttttataatctgccctttgtgaaccttcaggccgagcccttttttcggcggtacgataaattgctgtgtcatcagactgctcctttttttcttctattatgaaccccggccgtttgtttcatgtaaagcaatttattggatgtatattccccttctgacggccgcaatctaagctttgataaaggggttgaacttcatgagtaaatcacaggaccagcctaaagggaatctcgcttggtggcagctctccttaatcggtgtcggctgcacaatcgggacgggcttttttctcgggtccagcatcgctattgtcaaaagcggatattccgcgctgatctcatttcttattgccgggcttggcacctattttgtctttgagcagctcgcgaagctctcggccaaacagcccgaaaaggggtctttttgcgcttatgcgagaaaggctttcggcacttgggccggtttcagcaacggatgggtgtactggtcgtccgagatgctgatcacgggaagccagctgacagcgatctcgctgtttacgaagcattggtttccgaatgtgccgctgtggattttcgcctccatctatgcggtgctcggtcttttgattatatttacggggctgtccgtttttcaaaaaacggaaaatgtgctcgctgttgtcaagacggcggcgattgttatgtttatcgtcatcgccatattggcgctgtgcggtatattttctcataaaccggatgtgcaggtgccgaacgaatcaaaggatttgttcccgcacggagcgatggggttatggacgggattgatttatgcgttttacgccttcggaggaattgaagtcttggggctgatgaccgtgcatttgaaaaagccggaggaagcctcaaaatcaggccggctgatgcttgccgttcttgcggtgatttacgtcatttctctcggcctggcgctgctgttagtgccgctgggcaaattcaccgaacaggacagcccgtttattacatcgctgaagggttttcatttagatatcattcttgatatttttaacgggatttttattattgcgggattttccacgctcgtcgcctcgctgtttgcggtgacgacattgctttgtacaatggctgatgacggagatgcgccgaaatgcttcagattaaaggaaaacaaaaaaatctgctggcccgcgctcggattgacgtttgccggactcatcgtctccatcatcctgtcattggtgctgccgaaaaacatatatgaacacatgacaaccgcggcgggcctcatgcttctttatacgtggctgttcattttgttctcgggcaagaaactgcttgaaacgacaaagatgggaaccgtacagattgttatcgcccttgtgctgattgtcgcggccgtctccgggacgctgtttgagaaatcgagccggcccggttttctggtcagcctttgttttctcgccgtcattgcgatcgtgacatggatcgtacaaaaaaagcagggacacagccctgccggatcatagcttatttcgtcggtttaaacagtctcttcaaataagaaaagggacactttgacacttgggtctcatcatcacggaggaaatattgcttccattctaaattgtcttttcctccgtaccaccccaatcggggatgaagaggggcttcatcatacgcctctaagcgttttctgatcagccggctcatgtttcgtccgaacgcggttgaatcatttaatccttcaaaaacccatctcggctgaaacgccagcataaaaaacgggaagcttctgctttgtctcgcttcatgcgcaggcgtcgcgcacagaataaaatacggctcgccgtcaaagcagaactcccatttataatgttcagggtcttccggtatgtcttccggccagtctttcgggtcgcagccgctcagccggtttaaaaaagaccagaacagctcttcatacgcctcaacggaataatgctcagctaaatcctcaggcgtatcaaaaatcacaagcagcgacgcgtattttccggtattccttgagatctttccgtactcggacagcagcatccccacttcctccggggttccctcttcgcggggatcacccgcaaaggatatccggagctgatctgtcaaaaatccctgacgtccgggaatgcacggaaacgtatccgctttatcgcctactttttctgatagaagctcaaaagcgattctctgccaatttggcagatccaataacttttcctcaaggcaactttttgtgtacagcccgcttgccatcggcccacctccagtatcgtcaggatacgttatgatggagacaggcgataggtgacagtccttctatttatgagatgagcatttgaatcccctgccagccgaaataaaatccgaaaacgatcaaagacacacccgccgctcccgtcagccagcgaagcgctgtttcatgaagaagatttctgaaagtgctcgcagcgaccgccatgcagaaatcccagatcaaaatgccgagaagaatgccggagctgtaaatcaaaagctgatttgcatcgaaggattcagcggttttggcgagaatgctcccgtatatgccgagccagaataaaatgctcagcggattggaaagagaaataaaaaaccccgcgccgaaagttttgtaaaaagccggttttccttttccgcttctgacattcatggcttcccttatattttttaacgtttcgactcccgtgtaggtcagcacgaaaaaaccgaagagccacaaaaacgtttttacaaaaggagcggtcaaaaattgagacagcccgaaatagatcaaaatcatatacagcccgtccgcggccatggcgccgagaccgaaaatccatgcatgccaaaagccgtttttgatgcctttgtcaatttgcgccgcattgaccgggccgacaggtgctgacaatgacagcccgagaacgatgtagcttaaaaagatgttcattggcttccccctcattcatgcaacttgtacaagttattcatgaatgggccgtgctatgatacattattttaatttctcaagctcgtcttccatcatgtccgtcgcttttcctaaaaaatcgaatatcagccgcagttcttcttctttatattgccggcaaaggctgatcgtggactgggataaggagctgaataattgcttcacattcgcttttccggctgtcagcggcacgatgatcacccgccgtttgtcttcggggtcttttttcctcatgacatatcccgctttttcgagccggtcaatgagcgccgttaccgaacctgtgctgaggccggtttttttcccgagctcgcctgcggtcatcgggcctgcttcatttaagatatcagctgatttcaaatcggtcggaaacagaccgagagattgagcggccgcctgatgaaacaggatcgtccttgtggccatcttccggaataactgtatggcggtttcctccgtctcgcttctggtatttcttgttgacaactgacaggcctccctataaaatcaatttatcttgacgatcaagataattttcggcaaatctaatatgatcatagcaaatttaatgatcaaaagtaagtatgggaggaaaaagcatggaacaaacagccgcgaaggacgcctcgacgaagtttgtcgtcatcggtcttttgctgggcattttaatgtcggctatggataatacaatcgttgccactgcgatgggaaatatcgtggcggacctcggaagtttcgataagttcgcgtgggtgacggcatcatacatggtagccgttatggccggtatgccgatttacggaaaactgtccgatatgtacggacgcaagcgtttctttttattcggtcttattcttttcttaatcggatctgcattatgcggaatcgctcaaacaatggatcagctcattatttaccgcgtcattcagggaatcggcggaggtgcgctgatgccgatcgccttcacgatcatttttgatttatttccgccggaaaaacgcggaaaaatgtcgggcatgttcggtgccgttttcggcctttccagcgttctcgggccgcttttaggcgcgctcattaccgactccatcagctggcactgggtgttttatatcaacgtgccgatcggtattttatcattgtttttcattcttcgttattataaagaatcccttgaacacaagaagcagaaaatcgactgggccggcgcgattacgctggtggtttccattgtcggtctgatgttcgctcttgagctcggcggaaaaacgtatgattggaactccgttcagatcatcggtctgttcgctgtgttcgccgtgttctttatcgccttttttatcgtggaaagaaaagcggaagaaccgattatctcattttggatgtttaaaaaccgtttatttgccacggcacagattctggcgttcctttacggagccacatttgtgattttagcggtatttatcccgattttcgttcaggctgtgtacggcagcaccgcgacgagcgcgggctttattttgacaccgatgatgatcggttctgttatcggaagtatgatcggcggaattttccagacgaaagtgcggttccgtaatttgatgctgatttccgtggtcgctttctttatcggaatgctgctgctttccaatatgactccggatacggcgcgtacgatgctgacggtattcatgctgatctcaggattcggcgtcggcttcaacttctcactgctgccggctgcgtccatgaacgatctggagccgcgttaccgcggaagcgccaactcaacaaactcgtttttgagatcattcggtatgacgctcggtgtgacgattttcgggaccatccagacgaatgtgtttaccaacaagctcacagattcattcagcggcatgaaaggagcgggcggcgcgatgcagaacatcggaaatccgcaggagattttccaggccggcacgcgcgcccatattccgccgcacattctggatcgcattattgacgccatgtcgcaaagcatcacatatgtattcacgcttgcgctggcgccgatcgtcattgcggccgttaccattttgtttatgggaaaagcgagagtaaaaacctctcaggaaatggcgaaaaaagcgaattaaaaaaagcagtacatggcgtttgtcatgtactgcttttttgtttactccgcgaaatgcggagcgagaatgtctttcagcacgtttgcgctatggttgaattgacgctgttctgtttcattcagctcaagttccgtcacaccggcgatgccgttccgattgacgacagccggaatgccgataaagacgtcgtttacaccgtattgcccgtccagatatgtgctgacggttaaaatactgttttcattacgcaaaatcgcttttgtgatgcgggcgaggctcatcgccactccgtaatatgtcgcgccttttttctcgataatatggtaggcggcgtttttcacatcgtccacgatctgatccagctcgtcctgtttgtaagctgcatttttctccagcaattgctgcaccggcactccgccgatattggcgtgactccatacaggaagctcggtatcgccgtgctcgccgataatgtgggcgtgtacgttttgcggagcggcgccgaaatattcactcagcatataacggaatcgcgcagaatccagtgtcgtgccgctgccgatgacgcgttctttcggcagaccgctgaatgtccatgtcgcataagtgagaatgtcgaccgggtttgtggcaacgaggaagatgccgtcaaatccgcttgccattacttcaccgacaatgcttttaaaaatggcgagatttttttcgaccagctcaagtctcgtttcgcccggtttttgattggctccggcacagatgcatacgatatcggcatccttgcaatcttcatatgttccgtaagacgttttcaccggatgaggtgcaaatgcctttccgtgatttaaatccatgacatcgcccatggctttttctctatttacatcaatgatcacaagctcatctgtgatcccttggttaattaacgcaaatgcataactgcttccaacaaaacctgctccgattaatgctactttgttcactcgttcgttcatcatgtatgctcatcctccagtgtttcgtggtgtctgtttttaacttgtgaagtatttcacatttatattgtgcaacacttcacaaacttttgcaagagaaaagtttgatttttggacaaaaaatatcgatgatggtttccagattgttgacaacatcctaaaacggaaccgttttaggatgttgtatcttttcagcgtgattgaagacgtgctgtccttttcccagaagcgagggtttgccggcacgctgatgtgatgatagccctatccattaatgcggaagataaccgtttaaaccggagttgttatacaaaccattctgcacataatcaaatccgggctggttctgcccgggcacttgggcgctgccattgttaaaaatcactttggcattggccgtatccgcattcgcaggcagcgtcagcgtgtaaattccatttgcattcttagtcattgctttccccggccacgatccggttaattctatggccctgcctccatcatgtttgtaaatataagcatttacctggccccaatgatccggattttgatagccaatgatgttggtttgggcctggtcttttttgacaaacgtgtattcttgagttctctctgcaccctcgccgttcgttccggttaacctgatgttgtatgtcgtgccgattggatctcctttcccgatcgttaatcggtctccatccttaaatgctgtctgctgcccattattgatttggtaaacggcttttgctgttttcgcatttgcacgcagggtgaccgtcagctgatcattgaaagaatggactgcccccgtttggtaattctcaagaaagacatgaggcgcatttccaatatcatcagaataaagaacagccgcggatctggcattgatcgtacctgtcagtttgccgttcgctacttgaaatgaaccggcgccggccctattatcatacctgccgtcaggcaatttcgttgaagtattgacggtgacagaagacgatcccgcattagccagcacaacgccttttgagccgcgctgattcataaatatttgattgttcccattcggattcgagagttcctcaggctgcccggccattacattgtgaaattgattgaccgcagtgatcgcctgatctttaaataaggcgctcccgcgatctcctatttgactttttccgggaaatcgcaccccatttcctccgccctcaggtctggaaaagaaaagaggcgtgcttcctgagcgggaaccaatcactgcccagcctaaacggatatcgtcatcactcatccatgtggactcttcctcatcattggcatacgtatcatgtgattccacccatgtgaccaacttgtccgcagacacgtcagatgcataatgggagatattcgacacactcagattacggttctttaaagcggatctgatggaatgcccatagttagaagccgtcacattcatataattcgcataagcagtatctctggacgcgctgtcttgcaggatttctccgtattggaactccgccgatgtatttgtgatattcggccaaaatcggctgccgtaattcccatcatccggaagctctatatgcttggcggcatcatagcggaacccgtccgctccgtcattcaatgctctttccaagaaacgtttcagataggtttgcacctcagtattctgtgtattccaatcatacagcccaagcaatgaattttgagtgacgtcccacctgtccgaccaatttttaatttgtgtgtttccatgggtccagtttggaatacgcttaatctcgtcagaaatcgcggcgtaatcgctggtggtatgattgataaccgcatcaacaatgacttttacgccatatttttccgcggctgcacacatgtccttaaattcttgttcagtgcctaagtaacggttgccgatttggtacgatgtcggctgatacagccagtaccagttcctcatgcttttatctccttggttcccttcctttacttggttaatcggagacgtctgaatggctgcatagcccgcatcacgaatctctttcatattttgtgttaacgtattgaacgaccaattccaggcatgaaggatggtcccgtttttgaccgatgacgcggccacctcattcgatttgtttgcagtttcagcgtttgcagccgccgggcctgacaaaaccaaatgaaacagcaataaaaatccggcgaataacggcagtaaagaggttttgaatcgtttttcaaacatttttgacactccttatttcatttttgaagactgactgcggagtcaaaaattcctcttactctttcttcagctcctttcaactgttgtgaagactggagaattctgttaacgcttacatttcaacttatcacactctctctatcaaagcaacgcggcagagtgaattcaaatctatattcctatcaattaaaaagacttcccgctttcaaacaaaaaaagaaaccacctgtcaagatgatttcttttttatttcttttatcgctcttctgtaagacagcttcacaatgacataccgaagcagaaacagaatgcctccgcagacgataaaaagaaagatcattttcagccaagcaaagaatgtatggggaaaccccctgtcgtacatcgtaagcgccgccaccgcaaaagtgactgctattgaatctatccgctgctgcttcacccgctttttcagttcttctttggtgtctattctcggcatgagcattcccgacgctcccgccctgatgcaataataaacaattataatgaagaaaaccgccaagctcccggcccattccctaaacggacagttcagaacaagtccgcgtacgatgatgtcaagcaaagacagtgtgcccacaagcattccgacttctgaccaaatcattcgttctttctctttcacactctcactctttccattcacgtttgaaagtctgttccgacgctgattcatgacttcctcccgtactattaagaatggcttacaactcccattatatcttgccgattcataatgataaaccgaaatatcattgacaaaaatgttaataagggccccaattgatcaggacgcctatgcagataaacacaaggccgatgacaaaccaaatcagcgccagcggaatcatgaagcgaagccactttacgtacggaatgccgctggcagccagtacggccatcagaacgccggaagtcggattgacacagtttacgacgccttccccaagcatgaccgcttcaaccgcgacctgtctcgtgatgcccatcagatcggcaagcggcgccaaaatcggaataaatacgaccgcctcccctgagcccgatgatatcagaaaatgaagcagggcgctggaaatatacattccgattgcgcctgccatcgggctgaaaccgtgcagcagtgacgcaagtccattgactaccgtatcaagcagctttccgtgttccagaataacggaaatgcttctcgccattccgacgatcagcgcgccgtaaacgagcccctgacagcctgtaataaacgtttttgcgatatcatttgccgccattcccgcaatcaggcctgacacgattgagataaaaatgaacacggcggccatctctgaatcagaccagtcaagagtaagcgcgccgtataaaaagccggcaagcgacaaagccgcgacagccagaatcaatttatggcggacggtaaacgggactggcttgtcctccggatctgaagcctgcgggattgaacctgctgccggaaaccaatcgttccccagcagactggcgtcctttgcttttctgagccttctcgtataccgataaatatataaaatagatgatagcagaaaacaaatgtagacggcaatccgcaggccgatgccggaaaacagcggcagctccgcgatgctttgtgataacccgagcggtgaaggtgataaaatcgtcgcgttaaacccggcataacagccgatataaatgacggccgctccggccacggcatcccatttcagcgaacgggcgacgatcaggccgatcggaataaaaccgatcacggaattaacgacgatgccggttgtgccgaggatcgaaaatagagatccgacaattgcaataaacagcagctgtttggtgcggaacgtactgatgacattactgatcaatccattgatggcgcccgttttctccaaaatcgcaatggtgccgcccgtaaacaggattaaaaaaataatcggcgcggaacttgtcatcccttcctgaatcgcggtaaaaaaagcgatcgggctgacaggagactggtctaaagaatgataacttcccgggacggcggacgtcacactgccctttgtcaccctgtcaaattcccccgcaggaacgatgtatgatgctatcgcgcatagtaaagcgacaatgaacagcagcacataagcatcaggcatcacaaacaatttcttctttttcaatacaggttcggccttcggcacagccataacatcaccatcccgctttgaatttataaactattcagaaaatacagatatgtgctatattatatacagaccgattgcctgttttcaatatcaaaaataaaaaacagacagcttttgaaggaggacttacggcatgaacagactcacagagcatgaaaagcaagtcattatggacatttttgaccacctgcacgccaatcccgaagtaagctggaaagaatatcaaacaactgaatatctgactgaaaaactgaaagaggccggctgccgaatccgtacgtttgatgattgcaccggtgttgtcggcgaaatcggagaaggctcgcccgttgtggctgtccgggcggatattgacgcgctgtggcaggaagtggacggtgtctttcaggcgaaccattcatgcggacatgattcacatatgacgatggcgctcggcacgatgatgcttttaaagagtcagccgaagcttccgaagggcaccatccgctttatttttcagccggctgaagaaaaaggcggcggagcgctgaaaatgattgaaaaaggcgtactggatgatgttgacttcttatacggcgtgcacgtgcgccccgtacaggaaacggcaaacggccgatgcgcaccgtccattctgcatggctcaagccggcatatagaaggcctgattatcggagaagaagcccacggcgcgagaccgcatctcgggcttaacagtatcgaaatcgccgctcttctcgtccaaaaactcagcttcattcatcttgatcccggcatcccgcattccgtgaagatgacaaagcttcaggcaggcggagaaagttccaatatcattccgggaaaagcatcgttcagccttgatctccgcgcacaaaccaatgccgccatggagaaattaaccgccgaaaccgaaagagcctgtgaggcggcggctgccgcattcggcgcaaaaatcgaactgcaaaaagaacacagcctcccggcagccgagcgaaacaaggaggcggaagccatcatgacatctgcgatcagcagcattctcggagaagaacatgtggatgaacctcttgtgacaaccggaggagaggattttcacttttacgggttaaaggtgccgaacttgaaaacgacgatgctcggcctaggatgcggtctggagcctggacttcaccatccccaaatgacatttgaccgaagcgccatctttactggcgctgagatattaacggccgccgtcctcaaatcgtttgaagcataaaaaaaagcagcccgttacagggctgcttttcttcattacttcttcagatcttcaattgaattgacgtttttcatgtactgaggaacgaccagacccatcttgacgcctgtcagactcgttcctacatcttcatatttgcctttatatttagacgcatatgccttatgggtattcggaagccaagcagacaatgacgcatccgcgctgcctgtcgcaatcgcagtccacatcggtcctgcctccacttgcgtcagcttcacgtcatagccgaggtcttgaaatacttttccgattacattcgtacttgcgatttcactgtcccatgccacataagccaggttgattttatcccctttgactttatgggcgccttttgtccattgagccacttggtctttatgttttttcacatattcagctgcggctttggccggcttttcgccttcctcaacggcaatcatgacttctcccatatcgtcctgcgtccatttgaactggctgagaactttggccgcgttaggctgttccttactgaagccggttcttgtaatcgtatgaatctgctcggcagttccgtacgtttttttcggatcatcaaggaacttcagcttgtatctggagaacatccagtgcggcgtccagcccgttacgatgatcggctttttccggtcatatgatttcttcaatgtcgccgtcatggcggcacttgacgccgtgatgacattccagtctttcaatccgtaatccttcacggcctcatccgtcagggccatgatccccgatcccggatcgataccgataatggttttgttcacctggtccgcagccgttgccttatcatcagtctgcgaaccgcaggcagccaaagaaagagccagcgcagcggtaacgccgacaccgatgattttcttaagcatcaggcattccccctgctcttcttcttcactttaatgttttgcgtgatacggtcgagtgtaatcgctacgataacgatcgcgatacccgcttccactccgacaccggttttcaactgtgtcacggcgctgtatacttcagaaccgaggcccggcgcaccgaccatggccgcgataacgaccattgacaaagcaagcatgatgctttggttaataccggcaagaattgtttttgtggcaagcggaagctgcaccttgaacagacgctgagacgtcgttgaaccgaatgcttccgtcgcttcaatcagatcagccggaacctgtttaataccgagaactgtcatgcggatcgtcggaggcatcgcgaaaataacagatgccacaacgcctggcacaaccccgatattaaagaagaaaattgcaggcagcaggtatacgaaagccggcatggtctgcattaaatccagaatcggtgtgacaatgcggcggactgtttctttctgagacgcccatatgccgatcggaaccccgataataatggaaatcaaaacagatgtgacgacaagcgccaacgtttgcagcatcggcgaccaataacccaaataatcaataacaaggaatccgattaacgtaaagagtgcaattcctctcgtactgatccaccaagcgagagctgcaaaaataacagtcaataaaatagacgggatgaaacccaaaccgctcacaatcgcgtttacgaaagcggccaaaccgtttgagattccgtcaaagaaacctccgaacgtcatggtaagccagtcaacaaaccggtcaacgatatctgctaacggaattctaggcaatctgtccatttacttcaccccctgaacagaagaatcctgagcttgttcagcagaatcttcaacatttatataatcgttatttcctgaaagcgcgccgattaatgcgccttttacgacaatgcctttcatgcggtccttatcgtccgtgacggcgatcggaatattcgcatcagacacgacatcgaaaatttccgtcaagtatgtgctttcatgcacagtcgtaaattcagtatttaaaatatcctgaagcgataagtcggattccaccgcttttttcgcatccgccgcgtgaatgacgccgagaagctgtttctgtttatcaacggcgtaaatagaagaaataccgagattcttcatgagctgcagcgctacacgaggccctttgtcaatccgcacggtttcagcgcgcttcatgatgtggcccgctgtcagaactttggataagtcaacgtcctcaacgaatttctcaacgtattcattggacgggctcatcagaatttcttcaggcgtcccgatctgaacgatgttaccgtctttcatcagcacgattctgtcgccgatgcgcaatgcttcatcaagatcatgcgtgatgaagatgatcgtcttgccgacagagtcatgaaggtctaaaagctcatcctgcatgtctttgcggatcagcggatcaagcgcactgaaagcttcatccatcagaagaatgtcaggatcattcgtcaatgcgcgggcaagtccgacacgctgctgcattcctccgctgagctgatctgggaattggtgttcaaagccttcaagaccgacaagtttaagcgaatcaagcgctttttgctcacgctcttttttgtcgacgccttggagttccaacccgtattccgtattttcaagaatcgttctgtgcggaaacagcgcaaatttttgaaagaccatgctgatttttttccggcgcacttcccggagctggtcttttgacatatttgttatcatgtcaccatcaatataaatattcccggcagtcggttcaataagccggtttaacagccgaactaaagttgatttaccgctccccgatagacccatgatgacaaatatctccccatcatatacatcaaagtttgcttgattgacaccaacggttgatccggtcgctttcaggatctcttttttgttttttccgctggacagcatctgaatggctttttttgtctgttttccgaaaaccttagatacattttcgacttttatcttaattggtttctcatccaaattcatattttccctccataataagcaatctttaataccgtaacacgtttgtaataagtcaaacaaacatcataatcccgtttattttgtatcattactttaaaaacatccctgtgtcttattttcctctggtatgcttctaaatactctctaatcctccttattgaggataaattataaaggaaatcgggcttttatcaggcttgagaacgtttccatcgaatgtgctgcaaactgatttcctatcctttttttacaaatacaagaatttttttgcgacattgtcccggaaaaagaagttttcgcctcctgaaaataagggattttaaggaaaaatataggtctgccaacagacagctcactaaaaaaagcaccccaaaagggtgctcattgcgcaagctctgtctgtttcgtttcttttccgagaataataatggtgatgacggcaatcaggatggccgcacaaaagacagcgaaaatagctgtaaacgaaacgttccgtgctgcaagcgatccgacgagaagcggaccgaaaatgccgccgattctgccgacggccgcggttgttccggaaccggtcgcgcggatcgccgcagggtactgctccggtgtataggcgtaaagcacgccccatgcgccgagattgaaaaaggacagcagcatgccggccgtgagcagcatggccaatgaatccgcggcaccgaagaaataagcgctgcccgccgttccgagcaaatagatgactaagatggtcttccgccccgctttttcgatcagccacgccgctgagaaatatccgggaagctgggcaagcgtcatcagaaggacgtattcgaagctctcaatcatgctgtagcctttcatcagcatcacgctcggcagccataaaaacatgccgtaataagaaaagacgacgcagaaccaaacgacagacagcagcaccgtcggccggatatacggtttcgtccagacacttcccgcctgcccgcgtatgctttttttctgcgtcaatgcctgatgcgccggtgattccggaaggcttttccgcaagtacagcgcataaaacgcggccagcgccgttaagagcagtgcggcctgccagccgaatgacggtatgacaaagtaggaaatcaccgccgcaagaagccagcccgctgcccaaaagctctcaagcagcacgatgatccgtccccgcttttcgggagcggacgcttctgacacgagcgtcgaggcgacaggcagttccccgccaagccccattccgatcagaaaacgcaatatgagaaaaaccgtcaatcccgttgcaaaagcggatatgccgcttccgacagaaaagaataacagcgtgatcataaacacttttttccggccgatcctgtcggccagcattccgaataaaaaggcgcccgctgccataccgatggaattgacgcttccgatccatttcatttgatcgggtgttaaattccaatcagtgtgaagcgcggcgataataaacgataaaattccgacatccatcgcatcaaacagccagcccattccggcaatcgccagaagttttcgcggagtgacggcaggttgtttgttcataagcagcacctcaaatcgaaaatgattaccgtataagtttacacctgtctttacacattgtcattatcttttttcgcaaaaaaacccgcttgccgtaagcaagcggggtgcagattaattctttaagactgcgtttttaatattatcctgaagctgttgaatccgtttcgctccgtcttctctgatacgtctgttctcttcctcgatctgtttcgtttcctgcataccgctgacaatcgtattccaagacgtttcaatcgtctcaatgtcaatgctcggacggcctgccatacgggcaatctccacgctttggtttgaaatattttcagcgttgcgcttcagcatttcattcgtgcggcggtccagctcgctcattgaatcagccacaagcttttgccgtttgactgtgacagcctgaatgatgccgtttttgaaaatcggaatcgtaatgacgaaagcggaattgatttttccgatgagcttcgtatttccgcgctgaaggaggcggatctgcggcgctgtctgcagcgccaccatccgcgccatatctaaatcatagacacgttcctcaagcgcctgaagcccgtcacgcagcgtatcaagctgcatttgcgcaagctggtttccgccggccgctttttcttcataagaaggaatgagcgcctgcatttcctcaagcttcatctgcccggcgacaacatatttttcaagctccatgtagtagttaatgttgttttcatacatctcttcaagcgtatggttcgtctttgccatttcatctttgtattttgaaatttcgacgtggattttttcaatttctccgcccagggtgcggtacttttgaaaaatcttttcaatcatgctgttgccgcgtttgaacattttagcgagaaatccttttggttcatcgaaatcatttttgtcgaaacggtccatgatttttccgagctgcgtcagcattgtgcctgaatccgtgacacttgttgttttcatcatatttaagatgcggtcggagaacttcgagatttcaactgccggttcttttccgtactcaagcagctccatttggtttttcacgtcaatctgctgcgaaatgcgctgcacctcagggtcttggcgcagctgcgccctgatgtcatctgctttttgttcagaaatctcttcatttttatcaagaacaagcggattttgattttctgtcatatttatttactctccctgcttttgcgtaatggttctaaacagctttcttacgagtgacggctccttatattcctgccgaaacaccatgtcctccagccaatggacatcaaattggctttcttcaatataatgctcaatgtcctgatggcccggcggattatacaagatgatatcgacgccgaatttatttaaaaacaaaagagcggcggcatcagaacgtgtgagttcgccattttgttccgtatgatataaaacgagtttcggaacggtttgggcgtaatcaaacgtctgaatcaattgcagcagcgaagcgggcagattcgtcgcctggcggaacaaatagattgcggcatcccttgactgctccccgggcaaagccttcagccctgggtttctgcacatgtcagaaatcacattggcgatggcgctctgcacacctgaaggcagatgcttgtactgccagatgttgcttcttttcagcctgtccgcgtcaatctctcctttttcatttaaaacctgactgtagtgatactggtagttggctttcagctcttccgtaaacggaaaactgcggatcatgtgtgtctcctgatagtccgcggcggtatggagtctgttccaatattctttcgtatctttggaaacccccatcactttcgcaaaaaggttcggaacggccacccgctccctgtccgctttaaattgcggccggataaacgcccgctccttcgcaatgagaaataactcatcatacgtcgtttttaaggtcacggactgcggggtgtgctccctgaactgccaaggcttatacatcatggattcctcatggttcagcacatgctcaatttctttcgttgaccggtaggccgtcgtggacgttctgtccggcttttctttcggaaaaggctcaagaccgcctgttgcggggagctttatcacaaagctgagctcctcatccggatcaatcaagctgaacggatcttccgcagccggatgaaacaataggacatcacagccgatcagcatgagataatagagaaaatagagctggcttttggtcgcgtctccataccacaccaccttcggcatctcacactctatatcggcttgttcgagccatggattcaggtggttcagcgaaaactttgacacatccaagagcacacgccggaaatcgggatgattcagcccgttttcatgccggtccgcaaaggtttccaaaagcgtcataaacgcggtcctcagccggcggtgcataagcggatcagcgtgtttggcaagcagcctgcccccatcgagaaacgcgacaaacctggaaaccgaaagccctttctctttttgattgaccgaatgaatgtgctgcagcgcctgaaacgtttccggcgcgatggtcttatccagcgtctcgctcaacacatggatgttttcatgagaagacagctcgaaaagcttactgtaatactccgtctcatcataaggagtgcccaaaatccggccggcaagccgggtaaacgccagcccgttttcccgctcgtaaccgggacgttccggcagcggccgcatcagaaacgtttcccagtcatcgttttccggctcggcctttcggatcaccaattcttcctgcttcatcattttcctcctttctcttcatgataatcggtacaaaaaaggaaggaaatgaactctccctccttttttgttttattcttctttagatgcagccgtctgctcctgaacctgcttttgtttgttgaaatagtggataataaacgtgaccacaaatgcagcgatgatgattccgaagaacaccacgtgcggcatttcataatcaaaagcgctcgccgccattttcacggcgataatcccgatcagcacgaaagccgtgttttcaagctcagggattttatcaattaacacaaggaatacttttgcgactgtacgcatcatgagaatgccgagcataccgccgatcaagagcacccacactttttccgataccgcaaacgcggctaaaatgctgtcaacagagaaggccagatccattaactcaactgaaacgacagtggcccagaaaattccgaacgtacggaccatccatgaatttttcttcatgccttccgtatcgtcatcaccttctccgatccagaaatgcttaatgacgagccaagccaggtacagcgcgccaagcactttgatccaccagaacttaatgagcagcatcccgattccgataaagataaagcggaaaatatatgccccgaacaatccgtatgttaatgctttcttccgctgtttttcaggcagatgccttaccataaccgcaagcactaacgcattgtcggccgacagcagcccttccagcagaaccaaggaaccgatcagcccccatgatacagggtcagtcagcacctcaccccacattttccaatcaaaaaaggaagcgtaggtcgacataatatgatgtagaaaatccaagttttttcctcctatttagtaaaacggtaatttcctgcttacacctgcaagccgtaattccggcaaagtgatgccagaccgccggaaaacccgctgccgatggcgttaaacttccattcagccccatggcggtaaagctcacaaacgacaaccgccgtttcaatcgagaagtcttcccctaaatcgaaacgaagcagttcattctggctgttttcatcgacgacgcgcacgaacgcgttcgaaacttgtccgaaattttggccgcgcgcttccgcatcatgaatcgtgacggtgatgccgatcttttcaatatttgcgggtatttttgagaaatcgacgataatttgttcatcgtctccctctccctcgcccgtccggttgtctcccgtatggatgacgccgccgctcgggtgttccaggttattgtagaaaacaaaatcaagatcattaacacagttgtcatgggcatcgacaagaaaagccgacgcgtcaaggtcaaagtcatgccctccggagtacttgttcgtatcccagcctaagccgatcaccgcttttgtaagaccggggttcgtttttgtcagatcaacacgctgtcctttcgccaattgaatagccatgtgccgtctctcccttctgtgcttgatatggttttagccgatttgcaggccgtaatctgtcgcaatacgggccagtccgccttgatagcctgagccgatcgcggaaaatttccattcgccgttatgtctgtaaagctcccctgcgataatggctgtttcaattgagaaatcttcagccagatcgtagcggatcagctcttcatttgtctcttcattgacaatgcgaacgaacgcgttggaaacttgtccgaagttttggccgcgcgcttccgcttcatgaatcgtgatgacgaatgaaattttgtcaatagcggcaggcaccgcgctcaggttgacccttacactttcgtcatcgccctcgccctggcctgtaaggttgtcgcctgaatgtgcgacagagccgtttccgccttcaagctgattatagaaaataaaatcatcgggcgacgcgcatcttcctgcttcatttaatagaaagacgctggaatctaaatcaaaatcatgtccgccatcgtatttgtttgtatcccagccaaggccgacaacgactttagaaagacccggatttgttttagtcaaatctactttttgtccttttgccaatgaaattgccatgtgtgcactctcctttttatcgtttaggcgtatcggttaacgatatcgccgatttttgtatcgtttgtgccttctcctactgcggcgaatttccactcgccgtcctcgcggtagatttcagccgcgatcaggctcgttctgcctgaatagttatctcttaaattgtaagtcaccagttcttcgcgattagcctgatcaacgacgcggatgaacgcgttttgaatcatgccgaagtcctgttttcgtctgacgcagtcgtaaatattgacgacaaacacaagtttattaatctgagcgggcactttcgacaaatcgatgagaatttgttcatcatcaccgtcgccttcacccgtcaggttgtcacccgtatgtacgacaccgccgcaccggcttttcagattgccgaaatagatgacgtttttgctgtctgtcattttatcattttcaagcatcagtacggaagcgtcacagtcgatattggcaccgcctccgccgaacagctttccgaaaaagccgccggatgatacagggtcccagccgagtccgaccagcagttttgacaggccggcttttccttttgttaaatcaatccgctgtcctttttgtaaagagatcgccatatgattcactcctattctgtaagggtgccgctaagcacgccgcaagtgcgcatttttactaaattccgggacaagaatcccggtgtttattaagttatacgtcttttattatatcaaagtttcataaaacataagaatttttggcgaaaaacggcgaaaaattacttcctatattctccttcgttccggagagaatagagaaaacaaagaaattgacggggactgaacatttttcctatccttgtatcaatacatgtcaggaaaggggcagacgagtgattgatttaagcatacttgatcaggcgcccgtatccaaaggaaacgggccgcacgagacgctccgccgttcagcggagctcgcccgcctcagcgaaggatggggctataagcggtactggtttgccgagcatcacggcacaagagggctcgcaagcgtttcgccggaaattatgatcgctcataccgccgcagccacaacgtccatccgtgtcggatcaggcggcgtgctgctgccgcagtacagcccctataaagtcgcggaaactttccgtcagcttgaggcgctgcatccgaaccggattgaccttggggtcggacgctcaccgggcggcacgacgaaaatccggctcgccctcacagacggggtaaagaaaagtatgaccgagttcaacaggcagcttcaggatttatcatcctttctgacagattcggttccctcggaccatgcttatgccggaataaaaacagcgcctttgattgaaacagccccgcagctttgggtgctgggcctcggggaaaacagcgccagacgcgccgctcttcaaggtgcgggctatgtcttcggccatttcattaatccggaacgcggggtaaaagcctttcagatctatcgggaccatttccgggcctcctcccatttttccgctccggcctcactctgtgccattttcgtcatatgcgcagctacggatgagaaagcggaagaactcgccttaagccaggatttatggcttcttcgtgtcggaaaaggcgccgacagccgcgtgccgagtgtggaagaagcgaaggcttatccgtattcgccggaggaccgtaaacagattgcagaaaataggaagcggatggtgatcggctctgctgccgcagtgaaacgccgtctgcttgaactttccgaacgttatcagacaaaagagatgatggtgctgtgcaacgtctttgatttcgaagcaaaaaaagagtcatatgagcgtcttgctgatatatttctgtaaaaaaagccgtcaaacggcgcagcagatgagactgctgcaccgcttaacggcggttttttcgttcttttccttttttaaacgcattccaaatcccctgcagcataaagccgagcagaagcagaatgattaacagtaaagtgattgacggccccggaggcgttccgagctggtacgaagacgtcagccccatgaacacactgaaaagagaaataataatggccgccgcaaacacccatttaaaccctttggcgatacggattgcaaaagccgcgggcagtacgaggagcgcggaaacaagcagcacgccgataatcggaataatgaccgaaatcgccagccccgtcacgatgctgaatgacattgacaggagatttgtgttaatgcctgatgtcttcgccgtcgcctcgtcaaaggtaagcagatagagcggtctgtttaatataatgaaataaagcagaatcagcagggtaatgcctccgataatatagacctgctgctggctgaccgtgacaagcgatccaaataaatattgatcgatgctcatcgacgcgccgccttttgacaggctgatcagaaacatcgcaaacgacagcccggccgccattaagattgcgatggatacctctgaatatgtacggtatgcccgccgcatatattcgatgccgatcgctccgatcgtgacgacaacgatgctcgccgccgtaatattggtactgagaaaaaaaccgatggccacgcccgacaatgaaatatgagacagcgtatccgccatcagcgcctgtcttctcagcacgagatatacgcctaatatcggcgccataattccgatcatgcttcccgctagaaaagctcgtcgcatgaattccaagtcaaacatttccatccgcctttttcccccctctcaagccgtatgactttatccaaatactgctgtacttcattttgttcgtgtgtcaccatgacgacggtgcggttgtgatttttcacctgatgatgcataaattcgtagaaaccctgtctgctttcatagtcaaccgcggttgtcggttcatcaagcatcagcagatccggattgcttgcaagcattctcgcaatgcagattttctgcttctgtccgccggataaatcgccgattttccggtggcggaaatcccacatttccaccatcttcagcgcgttttccacctcgtggtgatccgtttcgttcaatcgtttaaaccattttcctttcgtataacggcctgattgcacaagctccagaactgtgcttgggaatcctgcgttaaatgaagaaatctgctgcggaacatagccgattgtcaggcgttttccggcagcgttttttttactgatctcggccgttccttcccaaggtctgagcatgccgagcatgactttcatcagcgtcgattttgacgcgccgttcggtcctgtaatgccgacgaattcgccgcttttgatttccagcgacacaccgtcaagcacgggtgtatgcgaataaccaaaaacgatatcctgtaatgtaacgagattcatgctgaccttcctttcccgcatagaaatagtgtgcaccccgcggcgcacactatgttatttaaccaatagcgaatctttcagtgcatcaaggtttttctccataatgtcgatataaccgatgcctttatcccgttctttttggcttaaaccttccagtgtattgagcacttccgttttcgcgccgatttcaccggcaagtgtatctgcaactttaggcgatgcaacttcttcaaaatagatgatcttcacatcatgctttttggcaaacgttttgagatccgccagtttggccgcactcggctcttcttcaggagaaaggcctgcaatcgcgacttgttttaagccgtattctttggcgagatagctgaatgccgcgtgctgtgtgatcaattcttttttcgacgctttatttaatgttgtacggtatagtttatcaagatcctgcagttttgcaatatattctttactatttttctcatagtatgctttattcttcgggtcctgttttacgatctgcgccgtaatggttttgacctctttttgcgcaagaaccgggctgagccacacgtgagggtccatgctgtggctgtggtcatgaccgccgtgtccatgttcctcttcctcttcatccgaaccttcgagcaagtcaattcctttcgacgcctttacaaacttcgcatgatcagagctcatgcttttttccgctgaaggaacccatgtctccatatattcgctgttgtatacgaaaagatcggcgttttgaatgccggcgatatccttcggcgtcggctcccaatcatggggttcgaccgaagacgggatgagaatgtctacatcgcctttgtctttgacaatttgtttcgtgaattcgtacataggataaaaggtcgtcacgacgtgcagtttgccgcttttcgaagaacctgacgaaccttttgaagatgaattgccgcagcccgccgcgattaaaaagcatgccgcaatgacaatgattccgctccattttttaaacaagccgtttccccctgttctgtaaatcagaatgatgacgatttccaaagcgtactttctcgttcatttgttacctataccataataaaacgaagtaattacgttttgcaagtaatttttttctaaattgataaccgatttacctaaaaagcccccgccatgtatggacggggcgtcgtatcacatatcaggcatgcagataaactcttgtttcgtaagggcggaacgtgatgcgggattccgctccgccgttattttcatagttgctgagaagcagctcggccctttcagattcggagccgtccggccaataaaaggcggcttcttctttcgatacgttgctgatggatatgattttttgtccgtttgcctgtctttcatacacaaacagctgcgggtcatcgggaaacagcagcgtgtagctgccttttatgatatcagcatactgttttcgcaggcggatcagttttttgtaaaagttcaatatagaattgggatcatcctgagcctcggccgcattgacggttttgtaattgggattgaccttcagccacggttcgccctccgtaaatccggcattcttgctgccgtcccactgcatcggtgtacgggcatgatcgcggcttttcgccataatggacgccatgacttcttccctgttgcggcccatttcaaatacccttttgtgatacatattgacggtctgaatatcttgatagtcctctattctgtcaaacggggcgtttgtcatgccgagttcttctccctgataaatgtacggcgtgcctttcatgaaataaagcagggcggcaagcattttggcggatgcctttcggtatttgccttcgtctccgaagcgggatacgatccggggctggtcatgattgcaccaatacagcgtattccagccttgatgttccagtttttcctgccagtctgtgagcactttcttcaaatcggacagctcaagcggttttacatcccaatgctcttggcccggcttttgatcaagctccatatgctgaaaatgaaaaatcatattcagttcatgctcatcggttcccgtgtaaaccagcccctcctcaggcgtcactgatccggcctcgccgaccgacatcacgtcatattttggaaaatacctctttcgtcatttcttttaagtaatcatgtatccgtgctccgtttggccggaaaggcttcggatctgcccggcgggcgatgtaatcttcatatggcggcaagtattctttttttgacagaagatgaagctggtctattcgcaatccgtccacgcctttatcgagccaaaatctcatcatctcgtatactgattgccgaacctcgggattttcccaattcagatcggcttgtttaacggcgttcatatgcaggtaatattcgcccgtatgttcttcgtactgccagacggattgtccgtaatccgacacccaatcggtcggcgggccctccgcggtgcccggccgccaaatataataatcgcggtatttgctgtccggattcatttccgcctctttgaaccaaggatgctccgtggaggtatgatttaaaacgaagtccatcacaagctttaatccgcggctgcggcattctgtaagcagatcgtgaaagtcctccatcgttccgtatgattccataatcgcttgatgatccgtcacatcgtagccgttatcgacgtttggcgacgggtaaatcgggcagatccatatcacatcggcgccaagctcttttatataatcgagacgcgcgataatcccccgcaggtcgcctatgccgtcgctgttcgtatcttggaagcttcgcggatagatttgatagacaacggcgtctttccaccagtcattcgccatcttgcggccctcctgttttttagagaaccatttcctgtatgccccttctctaaacaaaaaagagaaggtttcccctcctcttttatctttccagctgggacggataaagcgtcatgcctccgtctacgaaaagtgtcgttccggttacgtaactcgcttcttccgacaccatccatgcggcggccgcggcgacttcttccggttttccgaaggcgttcatcggaatttttttcagctgggcctgtttatgtgtttcatcttccagatccttattggactccgtggcgatcgtgccgggagcgatggcattcacccggatgcctttgtctgcgtaattgagcgccatcgtttccgtcatcattttgatcccgcctttggatgccgagtactgcacgttttcaggacgcggtatttgctgatgaacgctcgatatgtttaagaccgttccttttttgccgtgctcgagcatatgtttcagtgccgctttcgcccccaaaaaggtgccggtcacgttgacgtcgatgaccctttgccaatcctccaggctcatttcatggggcatcgcttccgctccgttaaagccggaattgttgaccatcacgtccacgcccccgaaatgctcctgcgcggcattaaacagcgcctgaatcccttcttctgaggatacatcggcttttacggtgacggctctgcctcccgctttctcaatgatatccgccgcttcttccgctccggcggaatcaccgaggtagttcacaaccacattcatccgctccttgccgaagcgttcggcaatggcttttccgattcctttcgaagaacctgttacaatcgctgttttcccctgtaaatcctgatacattgtctcatttcctccctgatgttaatacagagcatgtacccggttttaatcggctgaaaacaaaaggaatcataaaaagaacgatgaaaccgaagctccctcgttcttttttttattatgcgtagttgttcatttgcagccttttttgcacgccgacaagcctgctgaaaaaataagatgccgctttgtagttctcccgtttatgaaagaaatgagccgcgtcctgaagcagttcctctgtgtcagccaacagctcctttgattccaggatgtcaaaatactctttgagcgaatcctgtccgccttccccctgataaagctctttaatcagacggaatttcgtcatatagatctcatcttcccactccgccgcgcttctcatgccccgcgcgcagctggcggcggcttcactgtatttttccgttttaaagtagatatgcgtgagtgaaaaaacagcctggatgacctgccggaagctgtgtgcttcaaatccggcagccgcccgttcaaaatcctccgccgccttgcaaaagtcacccagactgtacatacagtgcccgatattataataggccgcagcaatcatatattgatcatcaagccgctccgcgtgctccaaggcgcattcgaggtattccagcgcttttttatgctgctgggcgtccatcagatttccggcaatgataaatttgcactgcacccttctcattccgtataattcatatttcttgtaaatatcaagcgcctgccccgcgtaattcatcgaaaagaaagtctgcttgatatgatagtacacctcagaaattttatacagaaactcggctttctctatgtcatcttccacatattcaagcttttcctcagcccgcttataatgagaaatcgctgagatgaagtttttctgcttaaattcatacattcctctgaaatagtaaaaataatattccagtaagccggtcagcttttgctggttcatctcaatctcagtgagcatttcagagaacggaggctggcagtcgccgtctttcatgggttttaatttatccagcatgatgcggtgcctaaattccatcaatgaaaaatacaacaataaatcctgattttcttccatatcttcgagttcatattgaatctcccgcttcagcgcttcagctttatcggcttcaaacgcgcggatcagcttataccattcattcatctttacggccacttcttcagatggaatcttggatttcatagatttgcctccttcctccggctactaattatgttatattttatcatagcaaatttatggcagtgagcaaacaaagattttaatcaattaaagaaagagagaattcaccatgaaactaccagtcagaatttcgctgcttctgatcctcttcttttccgcagacctatgtttttcctatgtgcagaaagaattgaggccgcagacggcattacaagatagagccattccaagcgctcttcatccgctcgtgaaacagaatgcggagctattgcggacggccgctctgaaaaaaggcatcaccgtcgttatcacagagggtttcagatcaattgaggaacaaaacgaattgtaccgtcaaggacgttcaaaaaaaggaaatatcgtcacctacgcaaaaggcggggaatcttaccacaattacggccttgcgatcgacttcgccctgcaaaaaaaggatggaagcctgatttgggatatgacgtacgacggaaaccgaaacggcacgcccgattggcttgaggtcgtatcgattgccaaaacgctcggttttgattggggaggcgattggagaggctttaaagattatcctcatttacaaatgatccctggctaataaaaccttttcttttttcgcttctgcgcatcaatgtacggaggatagacaggcctgtacacaagcttatatccttcattgccggacggcgtaaaatcgcgctgccactccagccgcagatggaaatcggataaaaaagcggcctttgcttcttcgggagtaacggccggcaccggattgatcttctccagctgctccgggtcaatgtcaggcgccatataagcttccacaagccccgttacgggactgacaagtattctcgcagcgccgaaccgcagcggaatatcctgatgccatacggaaaaatggaagcggaacctgccccttccgtccgttttcagcgggttcattttaaaaaactcgtccgctctcggataaagcttgtataaaaattgaagcgcgacggcctcacactcttccgcagaataaaaggccgggccctgatgctcaataaaagatttaaaggctgtcattttccctgtctttttgtccgttttcatcttcattgtatttttgttgctggtttcaaaatagctttcgatactcaaatctttccgttccggaaccgaccctttccgccatgtcgttccgatctcatccccgagatcgcgccggcgcgtctgaaccatatccgaggtaaaccccatcaattcatccaggctgatttcccgtttatgttcaaacgcaggaagcggttttgccggctcattcctgtcttcgcaaagctgctgatccggcacgatatcatcttcaccggccggatagctgtaagccggcagaatcggttcatagacgagacgcggtatgttctcaaaattgaccacatcatagacgagactgaatgtcagcacactcatataatgcgagacgactttttcccgatcgacgaatgtttccgggacgggcgcttcacccttatccccgtaatagataaactgcacgacgaagccgctcctggttacatcaacgaaaaaacctgaatcgggaagcggccggccgagcactttttttgtatagataaatcggatgcacccattgcgttcttccctcgcctgaaagatgaaattcataaaagtaagcgggcggtgtctcgccgcaaaccgaagagccgtcagctttaattcggcgtctgacagctgcatgtctgaacccggacagtcgttgcgtgaataggtaagcaaagatccgtcgtcgcccagctcaatcgttaccgttttatccggatggttacgatctttccatatataataggctctcgttttttgtttttcatcataatcttctatttcaagctcatagtgcggcggtatgttcccgatctccagcgctttttttctcagatgttctttcagcaatggggtcatcctttcagaagagtgtataaaaaagaactgtttttaattatataaaaacgtccttatccttttaaagggaagaaagtgccttttatgtgtctatttttagcaaagagggaaaagagccgtattcagagcggctgtttttcatacaatagtcacaattcccgcaaaagacccgggacgaacgcccatgaccttcagcctattaaactcgtgatcacttctcccgtatgggcctcaataaaccgcgggaaaaccggcttgtatacgagcctgtacacttttccgcagctgccgtcatcgtaacaacgatcccaagcgagctcggctttgatggcccggcggatcgcgtccttcgcctcttccattgtcaatgaaggaacgggatcgatttcctccagctctttcggatcaatttccggcggcatataaaacgtgacaagacccgtctttttgctgacgcagattctcccctctccgaatcgcaaatcaacgccgcccgaacaagccttatatgtaagtcccacgttttctccttcatcatccggctcatcatattgaacccggaaatactgatccgcttccggaaacatggcgaataaaaagcggatggccatgtgatggcattcttcctcggaaaactccggttcgccttcactatgtataaatgacatcactccggcgagccggcccgattctttatcatgcattgttttcaatacatgttcattccgttctttaaacagactttctaagcttttatctttccggacggattttgttttttcaggacgccatgcaatgccgatgcggccgtctccaagatcagtttccctctctttataaaaaccgtcgtgcagcccgatcatgtcattgatgctcatcttttccgcttcaggtgcagggcgtgaaatcgggacatacggcagcatgtcgtcttccagcccttcatattcgtctatttctgcattctcttccttcaggtcagccgatatcggccgcgtcggagacacgatttcatagacgagatgaggcttgtcatccccctgcacatagacggactgatgcagtacggtgaacaacagctccgcttcaatatgtttgacaaagtgagccaatgcttcccgcttgtccgcaattgttccgggtcttaagagattatcagccttcccatggtaagaaaagccggttacttcccctgtcaaagacaggtcggcgtaaaacccggtcagcggaagcggcagaccgtcagccatctgaacataggaatatctcacatcaccatcatttgcggagccgctgttttccaattcgaactcagccaatgcccccggacgatgggtttctacaaacgcccgcatccgttcttctatgtccgattccgaaagagccggcagatcagtccggaaagccggacgggataaggatttcagttttccgtcccggtccaattcgaccatgatgccggcttccggatcattcttatcttcccaccaaaacaaaacctcatcttcttggtattcttccacattactttcgtagcgggcaggtacgttaccgatccggagagccagctgtttcaattcttcttttttcatcataacacttccttttcttccaaaaagattgatgattaccaagactcttttatacaaaactagtataattaacctgtctgtcttcatgactattgaattaatcattataacaacagggggtaaaccagatgtccatcaaaaaaatgagcgccgtgtttttcatactgcttctcacggcatttaccgccgcatgcagcagcgaaacgagcggcggccaggaaagcagcacggcgaaagtgaaaataaaagagacggcatgggccgcttcagacgatactgaacatccggccgcgctgaaagtaacggtcaccgtcaaaaatacgggcaaagacccgcttaccgtcaaaagcagcgacttctcgctttatcaggatgacgcgaaaacagcggcggccgataaggatgaccagatgcagagcggcacgcttcatgcgggcaagacagtgacgggcaatctgtacttcacggctgacgaaggcaaatcatatgaattggtatatcagccgcaggcaaaagacgcgaagcctttatcttataaactgaaagtcaaaggcacagcctcaaacgcaaaacctgacccggcggacgcattatccgcatacattgatgtgatgctgtacggcaagcacaataaagatttcacccgcctgaccggtgtaaatgaaaaaatgacggccgccgcatatcaggaatcggcgaaagccagctttatcgcttctgcaggcatttcacaagaacaggcggattcaaaagccatttccgctattattgacgccatgtcatcagcgcttcgggataacacagagctcaaggtgcataccaaatccatgtcaggcaaaaaagccgtccttgaagcaaaagtgacgccgcttgatatgtctccgctcgcgggccagctgcaagaccgcgtgcaagactatgccggaaagcaccccgatgctgatgaaaacgaaattgtcagccacctgctttctgtctatccggaagagtttatgcgcctgaaaccggcttcttcttccgtaacaagagaaatcgagatgaagaaaaacgcccgcggccagtggtatctggatacagacgccgatctggaaggattgacagaagcgtttttgaaaacgtcctgacagcaagaaaggaaatagcgcaggctatttcctttttttattttcacttgaagatgtcactgatatattgaacctcatcctcggtcaattgcacatcaagcgcgcccagattgtgtttcagctggccggggcgtttggctccgggaatgatcgcatccaccgccggctgcgacagaagccacgcgagtgcgatatgcgctgtctgcgcccctttttcttccgcaacggcccgaagcttatccactcgctccaggttttggtgaaaagcttctccctgaaacggcggcctgttttttcggctgtcctcaaagactgtgtcttttgtaaactttcccgtcagcaagccggaagcaagcggaaaataaggaataaaagaaataccgttcttttcacaataaggcagcagatcatgctccgcctcacgctgaatcagtgaatattctgattgaaaaacctctaaataaccgtcggcgttaaactcctgcaattgcccgaagctgagattggacgcgccgattgctctgattttcccttcgtccttcagttcttttagcgtgcccgccacttcggagagcggtgttttgccgtcagggaagtggacgtaatacaaatcaatcacgtctgttttcagccgcttcaggctgttttccgcctcactacggagaaattcacggctgttgtccagctcgatttgtccgttgacctctttgtgcgcgccttttgacgcaatcacgaggctgtcccgcacgccgcgctctgcgacaacttcaccgattaactcttcggaacgccccaaaccgtatataaacgccgtatcaataaaattgacgccgccgtccaacgctgtgcggatgagttcttttcccgtttcatcattaagattcggaaacagattatgtcctccgaccgcattagcgccaaagccgatacgctttacccgtaaatccgtcctgcccagcgtacgtgtctcatccatggctcaggctcccttccttttatcgctctgtttagtattagataactggtaagaattatcctgccccgagagcatttctgcagaaaaaaccttgaaaagcatgtgcccttcaaggttttttggctgtgtattaagatgtcagagctgcggcgaagcgttcggcttcatctgtgagagcaccttcgatttccttatagcggctggaaatcgttgaggcgctgacgccgtacttcttcgccagcttggcttgagaaacggacgcgccgttcagagaaatactgtttacgtaatattcaaccgccgccgcgaaagcttccggctttctgatcgtcggtgtttttttgacacagaacgttttccacaggtcaataacggccggaaccagctcagccgggtattcatccccgctcaggcctttttcaatggcgtccgccgtttccttctccatgtcgttcgcccactccgtctgtttttcttcagcagcctgctcaggctcttccgccgttcctaaaagagcggccagcacagtgtcgaagtcctcctgcataaagcgctcaggcgattttccttccgcaagggccggggcagccgcctttttcactttgctgattagagcttcggtccgcttcacagggaagatcgtaaactgcataaagaactccgctttttccgcttcgtggatcggatagccgagaatcaggcttcccgccggcggaagatcctgctggctgacgtccatttccactttgaattgtttcttggtcatcacatcttcaaagtgaatcattccttctttcacatcttcaagcaccataaccgctggtgtcatgcttttccatgattcaacgatttcccgtgttttcggacggttgatgccgccggcttttttctgaagatattcttcaaaaatcgtcttgccgcctgccagcggacggaagaaaattccccagataccgaggttgaagactccgatgtctttagtctgtctgtccagctccgtaatgaactcatgctggttaataaatgatgatatgccgtctctatgtgctgtaaaggcgtactccattaagctttcctgaatctgtttcgcttcttttgccgcgatgtctgccggaatggcagcttctttgcttccgcagcattttttatatttcttcccgctgccgcatgggcaaggggcatttcttttcacttttcccacaataaaccctccgaattctgatataactttattattttaacaaaaataacttcagagggcttggtttacggcgaaaaaagaatatggaagaaaaaaaggccccgggatattctcattctccggggctttgaaactgttaatttgtattttgtccgccgccgttcagaccttctttaatcagcccgtttacttggctgttcatcaaaagtccgatgtgtccgacaccgtgaatctgcacgtttttcccgccgatcagtcgtgacagcgggttcagaacgatcaagtccgctgagctgtaaatcgatgtatataaaatcttttggttcggatcagtccccggaagcgcccggttggtcacaaggccgttcgctccgccgagtgtgacgacgttggcgattttgtctccgccgtcaagatttttaatgtaatagagcgtgttggcgccgcccatgctgtgcgcgacgatatcgacttttttcgcacctgtttcgctgagcacttttttcacgtaattggacagtctcggcgcattgtgtctgttgtttccggttttgtctaagaaatcaatagcgtacatctcttttcttgaccagccttgggatgccaagtatgttttgattcccgcaaagttaaaagacgccccgccgattccgtgaaccatgactacagggttatgccctgaggaggctttcgatacggtcggctggaaggcaaatacggaaatgacggacagcatacaaactgtaaggatgactaggattttgctttttatatgtttcatgaactttcctcctgctatgtaatatttttgcagttttcattctattagagaagaaaaggaaaaaatagtgtattttttactgttttcaacaattaaaaaagagcggaaaaatgagaaagacgcccctttcccgaaagcacgcttatgctttaatacggcataccgacaaaggagagaacacccggttctctactcctagtactcattgaaataggtttgaatccgcttaggatcttgcgtttttgtcagcgcgagcatgagaagaatccgcgctttttgagggttgagagagtttgaagctgtcaaatggtctttttcatactctcgattaggtgttaccgccccgtttcccgtccttgtggagcggacgaccgccagcccgcttttgaccgactttacagcgccttttagcgccgcatcagacattgagccgtttcccgggcctgcaaaaataatgccttgcgcccctgattttacggcggcttcaaagagatagcttccgtcattttgatagccgtatataatatcgacctgcggcagtttatcaagtttatctatcttgaaatctgtatccttcgtatgctttcgggtgatgatgttattaaaatagacgtcatcagcaattgttccgatataacccatttcttccgatttgaaagtgtcggtcgcggttgtattggtttttgtcacataacgcgccgaagcgattctgtcatttaatacgacaagcgtccccttgcctttcgcctcaggcgcagccgctgtttttaccgcgttatataagttggacggcccgtccgctccgatcgccgtggacggccgcattgacccggcgacaacaacgggtttgtcactcttgaccgtcagattgagaaagtaggcggtttcctcaagtgtgtctgttccatgtgtaatgacaatgccgtctgtatcatcagacttgagcagcttgtttacccgttttgcaagtttcagcagtgtctcgttattcatattctggctgccgatattcacaacctgttctccgctcacatgcgcggcctcttttatctccggaacggcctgaatcagggcatcaactccgattgcccccgccctgtactccgtagcggacgtctttgaaggagcagcgcctgcaattgtgccgccggtggcaagaattttaatattcggaagtccgtcttttttcgcagaggctgcggctgccatctggggcggtgtttctttcgtttgaggagattgggagcagccggccgcgatgaagagcagagccgtgataaatgtaatgaagggcatgaattgttttttcattcttttctctccttttctttatttatgatgattttcctctcaccggtcaacgcgcttgtcaggcattcttccgaagaaaataaccgttaaaaaaccttgacaccgtcatgcgaaatcaagataatagaccagtcactatattttaaatttgtcacaaatcagtaaggtgggaacattatgagctatggagattctcgggaaaaaatcctcgccgcggcaaccaggctgtttcagcttcaggggtattacggcacgggactgaatcagattattaaagaaagcggggcgccgaaaggttctctttactatcattttccggacggcaaagagcagctcgccattgaggctgtcaatgaaatgagccattatatccgtatgaaaataaaagaaagccttgatgctcatcttgatccggcggaaagcattcaagcgtttttacaggacttatcaagccaattcacatgtccggagaattttgaagggtttcctgtcggtttactggctgccgagactgctttaaagagcgaaaagctccggcaggcctgtcaaaacgcttatcaggaatgggagaatctgttcgcgggcaaattaagatcagccggtttttctgatgagaaagcggcggaaatcagcactgttttaaatgccatgatagaaggcggcatcattgtgtccttagccaaaaaagacaaaatgccgatcctccatatttctaaacaaatccccaacctgctgaagacataaaatacgagagacatgtacgtatagaaagagaggagaatgattttggaaaacgctcagccttccaaacaatataaagtcatgccgatcatgatttctttgctgacggcagggtttatcggcatgttcagtgaaacggcgctgaatatcgccttgactgatctgatgaaggagctacatatcactcctgcgaccgtccagtggctgacgacgggctatctgctcgttctcggtattcttgtgccggtatcgggtctgcttttgcaatggtttacgacgagacagctgttcatcgtttcactcgctttttccattatcggcacgctgattgcagcgcttgcgccgagctttccgtttcttttggcggcaagaatcgtgcaggctttaggaaccgggctgctgctgccgctgatgtttaatacaatcctcgtcatcttcccgccgcataagcgcggagcggcgatggggacgatcgggcttgtcattatgttcgctcctgcgatcggtccgacattttcagggcttgtgctagagcatttgaactggcattggattttctggatttccctgccgtttcttgtgttggctcttttattcggcatcgcctacatgcagaacgtgtctgacattacaaaaccgaaaattgacgtgctttccattattctgtctacgatcgggttcggcggcatcgtattcggattcagcaatgcaggcgaaggatcagacggctggtcaagcccgacggttatcggttcgctcactgtcggcgcgatcgcgctcatcttattttccatcaggcagctgacaatgaagcagccgatgatgaatctgcgcgctttccgctatccgatgtttgttctcggtgtcgtgattgtgtttatctgtatgatggttatcttatcgacaatgctcctattgcctatgtatttacaaagcggactgatgctgacggcgtttacgtccgggctcatcctgctgccgggcggtattttaaacggctttatgtctccggtgacggggcgtctgtttgataaatacgggccgaagtggcttgtcattcccgggtttgtcatcacggcaactgtgctttcgtttttctcaaacattaacggcgcttctacggcgcttctgattgtcgcgcttcatacatgcctgatgatcggcatttccatgatcatgatgccggcgcaaacgaacggcttaaatcagctgccgccggaattttacccggacggaacagccattatgaatacgctccagcagatggccggcgcaatcggcactgcggtggcggtcagcatcatggctgccggccagaagaattatatgagcaccgcgaaaaacccgaatgatccttccgcatactctcacgcgctgattgcgggcgtccagcacgcctttatctttgcgatgattgtcgccgttatcggcttgatcagcgctttctttatgaaacgggtcaaagtgaatcattcataagaaaacagcagactccccgtgagtctgctgtttttttatataccgcgcgcttcagccagttcatcaatcgcatagatcagatcgtcagctgtgttatagaaatgaggcgccagccggatgatttgtccgctggatgcgcatacgatgtttttccgcctcaacagcgcagccgtttccgccgctttttcatcccgtatggaaatcatgccgggtctgtcatcggcagacggcggccctgtgagattcagtcctttttcagaagcgtattcatacgcaaatgcgctgagtttttttacttcttggtgaatgcggtctgtgccggcatcgtttaatagagataaagccgcctgtgccgcatatatgctgataaatgccggggttccggtctcaaagcgtttggctccgtccgcataagaaaaacgggttaaatccggcatcgacgcccgctgctgcccgaaccatccggtgactttcggcttcagccgttcggcaagttcctttctgacataaagaaacgccgttcccggtatgccgagcatatactttctcgcacccgcggccagcatatcaactccccattcttttacatcaatcgggatgtgccccgccgattgataagcatcgacaaaaagaagcgatcccttctttgcggatatctcggcaatgcgctttatatcctggacaaaacccgacgtatatgacacatggggcacacaggtgaaaagcgtctgctccgatatgtacgtctcataccgctctaacgggatcattccatcttcagacggcacgactgaaagctccatctcagtctgtgccttcaaaatgtgggcgatcgccggaaaatccaattccgtatacaccgcctgtttctttcggcaatccggtaaagcagaaacgacggcagagacagcagccgttactgaaggtaaaacggcgatttcttcaggatgggcgccgatcaattttgcaaattcacaccttgcctgctccgtacgtccaatggcttcttcccagtttccgccatgctgaaacaggctttcctgatagtcattgaccgcttttgaaaccggcagggcaagagcgctttgagagcagctggcgagcatcgtatgtgtgcggagcaccggaaataaagatcggtattgcaccagaggcgaattcaagacatggttcccccttcggcaggaatatatgtccattatagagtatggtaaaaagaaaaggagggttttatatggagaaaaaagtattactgacaggctttgaccccttcggcggggaaacggtcaatccttcatgggaagcggtcaaacggctggacggttcccatgaaggccctgcctctatcgtatccgaacaagtgccgaccgttttttataagtctcttgccgtgctgcgcgaagcggtcaaaaagcatcagcctgacattatcatttgtgtcggacaggcaggcggcagaatgcagatcacgccggaacgggtcgcgatcaatctgaatgaggcgcgcataccggataacgaaggaaaccagcctgtcggggaaaacatttctcaaagcggtcccgcggcctattggaccggccttccgatcaaacggatcgttgaggaaatcaaaaaggaaggcattcccgcggctgtatcctacacggcggggacgtttgtatgcaatcatctcttttacgggctgatggatgaaatcgcctgccatcatccgcacatccgcggcgggtttatacacatcccgtacattccggagcaaaccttgcagaagtctgcgccgagcctcagcctggatctcgtgacaaaagcgctcaaaatcgccgcggtgaccgccgcggcgcatgaggacgatattgagaccggcggaggcgagcttcactaagcggcagacacctcggcccatttcttccggtaaacgatgcgggacagcgtcacactgatttcatagaggacgagcagcggaatcatgacgagaaagtcagacataaaatccggaggcgtaatcagcaccgagacgacgatcagcaaaaaatacgaaagcttccgcgcctttgccagccgggttggattcacgattccgagccgtgtcagaaacatgacggccagaggcatttcaaacaaaaatccgaacggcaatgtaagattcagcataaaggtaaaatacttgtccgccgtaaataccatgtcaaaatggccggcggataattgtgttaaaaatccgagcacaatcggaaacagcacaaaatacccgaaggaaattccgataataaacaaaagcgaaagccccggaatgtaaagcaaagcggcgcggcgttcgaacggggtcaaagccggcgccgtaaaacgccagagctgaaaggccgcaaccggaatcgctgccgtaagggcgcatattcccgcaatcatcatatacacccataaaatctcgctcggccctaaaacggccagcctgccatgcaaatccttgatcagccagtcataaatatcctgcacaaaccagcaggcgccgataaaaaacacgagaaaggcgataacgattttaatgagacgctgccggacttcctctaaatgcccgatcaagtgggtttcttttttatccaatcgtacatcctccttatagagaaagaggcagaagcggattcgtctgcccccatgtcaggattcagcctgccgttttgtctttctcagccgtctgcttgtccggctcttcatttgagaccaatgtttttgcggcgcttttaaattcaagcagcgtgcggccggcggcacggccgatttccggaagttttgaaggtccgaaaatgatgagagcgatgacgaaaatcaggatcaacccgggaatgccgatatttgaaaacatgagtgtgcctccttattgtgagattttggcccgtttctttctcatttgcttttcatgcgcattgttatgggcgaagaaacgatcctcttccacctcgtttgactgctttaaaccgcctgcaaccgccgcttgagagaccttccgaatccccgtctggtctttctgataaatgaatgaagcccgcgtggatacctcagcccccggctccgtcacgtacggcaccactctgtaatccgctctccattgggcaggagtcaccgtacagcggacatagccgcggtaatcgttgaaaaacttaatatgcgggttttgttttaagatctgatccgtatcggcccgtttatccgccccgtttcctccagatgtaatggaagtcccgacgaattcggctccgaaaatttttgaattcgtttgattaaaatcggtatgcaggtttgacgcccagcttgcatgaacatcacccgtcagcacgatgacattgttcaggtttttgctttttataaaattgatgacccgctcccgctgagccgggtagccgtcccatgaatccatgctgtatatcggattggcggttgttccgaaattccattgcgcgaaaaagatttgctgcgccagcacattccacttcgcttttgaggcggctaaatttccgaagagccattgctcctgctctgtccccatcaatgtgcgcttcgggtctctccactcatcagaaggcggcttattcccgtcgccgttggcctgatcatctctgtactgtcttgtatcaagcacattgaacgatgctaaattgccataagaaaattgcctgtacagccgcatatcaggaccgttcggcaatgacatgcgcctgagcggcatgtgttcataataagcctgataagctgcggccctcctgagcacaaacgcttcaacggattggcctttttcagggataacattggcataattgttttccacctcatgatcgtcccacgtcacgacccacggaaatgcggcgtgggcggctttcagattggcatcagagcggtattgggcgtgacggttgcggtaatctgacagtgtgtacacttcggcgctgctgtgcgtcctgacatttcccgtttttgacacatattcgttcggtccgtattcataaatgtaatctccgagatggaatacgagatcaagcttttccttcgccatatgtttatacgccgtataatagccgtgttcatactgctggcatgaggcaaatgcaaacgtcatggccgatacgtcagcgccgggagcgggcagcgttttcgtccggccgacggggctgagctcatgcccgcttttaaaccggtaatagtacactttattgggcttgagcccgtccgcctcgacatggacggagtgtccgagattcggcttggccatttccgttccgcgtttgacgatgtgacggaaatgttcatctgcggcgatttcccattttaccggcacggcctgcttcggcatgccgcccccattcagcgggtcaggggcaagacgcgtccagagaatgacgctgtcagacagcgggtcgccggaagctacgccgagggtgaacggatagtttgaaaatttcggagcggcattcacttcaaacgcgccgatggattgcgcgatcgctaacccgagggaaagaccggcgattttcccggcgccctgtataaatgcgcggcggtcaaacgtattgttctgaaagcttttgttctccaattccttgatccattcatctaaacggccgtcatgtgtcatgtcagttcccctttcgtcttattgatcgcccttattataaaaaagaaatgttaaaccgctatgaagaagtgtgaagggtttgtaaggctgaaaaatgaacggcgggagacatttttcacattgtttcgacaaaccttgccccgccggaagaaaaccccctctgtttctttttggcttgtcatccgtcaagcgcacttttttcctatttttcttcacaaaacattaaaaaaacaccgttcattttaagaacggtgcccccgggattaaaatgtattgtacacgttttcgcacgtctcacctgtcggctgatagaagcagtgggatctgaatctggcgacaaacggctggccataccaagtctgcgggcagttgcccggcggcttaaagtaccacagactgaacttagccggccaaaaccgttctccgttaatgttcctgcgggcaagcctccgctcggattcacgcggtctctggtaaaagtatccgtgagtcaccgcttcaaacgcgtgcggctgaaacaccatctgcctgatggtgcgcaggcctttaaaatcagaacaattcgcccgcacccgattgattcccacattgccgaccaaaagcattccctgcttcccttcgccttccgcttccgccctgagcagccttgccattagatcgacatcggcgctcgacgcttttacgactgccatcatgacacctcccgtattttctcctttcatcatattcagcagcggcccagtgatgacagccaaaagccagaaaacaaatgttcacgaaaaaagggtttatatttcacgttatgaggaaacatactaacatgatttccataaggaggaattcgaatggaacacattaaagcgcttgccattaaaggcattatgaccatcattattctgtatctgatactcggcttaggttttcgctttacattcggtgacgtgctgctgatgaccattgtgctgggagccgtttcctactttacgggcgacctgtacgtgcttccgagatggaataatatcacggcggcgtccgctgatttcggaatcgcgtttcttgttgtctggctgatgggaatgccgctgtccatgggcatttccggaggaagactggcgtttgccgctctcatttccgccgtcatcatcgccgtcggagaatattttttccatatctatctgatgagaaaagacttgggagggtcccgttttttagaaccccggtccgaataatgtaaaaaaggccggataacggccttcagcttgtagagaaaatgatgttttttctgcaagcttttttgttttttgctgtttctttacatatgcccagccttgcttggctgggtatgcggcaaccttcaacatcattttgaataagatcagcggatcaagtgaggggcggcctttattttcgttgcagtaaggtttgaccttttcaacgataaaagagaagtctatgtactgatcaatttttcgaagcaggtgatcctcttcaacgagttggtcaaacagaacgaattcggctgtattttgagaagcgtctcttgtgcgggtcttttattatatgacaggggaatggatattttaagggaaaaataaaggctgtcgagattttctagacagcctgagccccttaaagggggctttttatttgtaaagtaacgctttatacatcttgatataactgataaacccttttcagccttttttcgagctgttcaaaatgaacaaagcgggcttctctcagaaactcagtcccatcaatgaacaaaagaagcacggggacagtgaagactgaaaatctgccggcaacctcttctacctcgtcagcgttggtatgccccaatttgatattcggaaactgatccaaaacttttctgagctgcggcagaacagcgtgacatactgtacaggcaggtcttgaaatgtagataaaactgaattgatgctgcttaataaaattctcgatagaatctaatgaatgtaagtctgtcagctctttcatcaaaaccctccttcaaatcggctcgtctttcatgaccaagctcatcaatactcgtacattcactatacacatttatattgatcatatccgcttttttgcgattcagagcaccttaacgtcgtgcttgaaaaataaaagaacagttaccgcttttcagtaactgttcttagatacttatattaaaaatgcaaagcgtaagctcctgaaccgatgagtgcaactccgatggagactgcaatcagcaccacgttatattcaaaaccgccggcaccgttcgcaaaccctttcgctccatgaacttttacaatggcacctaacataatgatcgttatgatagcagctccaagcgggaggaatacacctaaaataaataaaattccgcttgcgagttccccgagacctgataaagcggccgcggcattgcctggtttaactccaattgactcgaaccattgtccggttcctttaatcccgtatccgccaaaccagccgaataatttttgtgatccataaaacagaaacaccacaccaatcatgattcgaataagtaatagtcctgcatcttccatttttatctctcctcatctttgatttcatctgattctttgctggacggtaccatccagcaatcatcaattgactatatgtttctttattttttatgtgtcaaatcaatctaattctcttacttcaaacggcagcagcccttgttcaatttgtgcccggtgcggttcatactgctcagggagcatcaattttccgcccattgtttcttgtgactcatcatgggcaaagcccggcggatcagttgcgatctcaaataagatttccccatgttctctgaagtaaaccgcattaaaatagtttctatcctgaacaggagtcacaccatatccgtgcgcagcaatgaatctttgccaatctaattgatcttcgtcatcctgagcccgccaagcgatgtgatgcactgtgccgacacccatttgtccgcggccgatcggcgttaatttaagatcaatcacattcccgatatcaccggcagaacgataacgaacgaagtctccttccttgccgactcgctcaagccccatgatgttttccagcagttcacctgttttttcaggctgtgctgataacagggttgcaccgccaaagcctttaatggcaacatccggggttacatctccgaaagtccacgtattggcctcccctgcttctctttccacgatttctaaatgcaggccatgcgggtcatcaaattctatatattgttccccaaaacgctcgatttttgtgtatggcacgttgaacttttcaagtctcttttcccaaaacgccatagcacctctcggcacgacgtaagatgtcacgccaacctgtccgtctccaatgatgccttgacgggcgtccgcccacggaaagaatgtgatgattgttcccggcttcccgccttcatccccgaaataaaggtgatacgtacccggatcatcaaaattgaccgtttgcttgaccaatcgcagccccagcactccagcgtagaaatcagcattctcttgagggtggccgacaattgctgtaatatgatggattcccatcgtttttttagccatttttatgcgctcctttataaatatttaaatatactccacaaactcattcacaggctttcggtagccgcgcggccttctgctttctattttttctttcccgattgtaatcatcatgacgacctcaaattgatcatctatattcaaaatctgtttcacggcttcaggatcaaaccctatcatcggacaggtgtcccagcctttttccttagcactcagcataaacatcatcgcagaaagtgaagcatttcttatcgcctcatctctcttaaacagttctcccctgttttcataaaacgaaacggtgttttgaaccatgtgatcatactcttgtttatttaatacccccagcaccttcaatccttcatagatgtcagccgcttgctgatatgcctgcttatcccctaaaaccaaaagaaccgctgatgagctgaacactttatattgtccgtttgcggcctgcttcagcttttcttttacctccgggtcaagaaccgtcacatattttgtatgctgcaaattaaaagctgatggagccaacgcaaccaattcaaacatttcgttgagctcatctcttgtgattggatgttctggaagaaagttgcttgcagatcttctttcattcaccagctgtacaaattcagccatttctctcgcactcccctttatctcgaattcgagatattatggtataaaaaatcaaataatgtatgatcaaaaaacaaaacgatcggcaggttcttatcctgcactctaattaaattgtctcgaattaaaatatcttgaattcaggataataataaaagataaatactcaaatgtcaacagttcatttttaaattcagcgcaattttgtttatgtactatttagccctgctccaactttttttctgtcaccttatttattagtaaacaggaaacaaccttgctatagacccactcgaaactgaattgatatgataagcaaagtgattacacaagaaaggatacggagagcgaatcaagagcgctcctatttttttgtgcagttttataggaggaaaaaatgacaagtgaaagagaacaaataagcaaaaaagttgctttgattgcattgatagccaatctgatcttaatggcaggaaagatcttttttggactgataggcgatagtgaagcagtttttgccgacggtatacattctgcagcggatgtcgtggcttcaattgctgtcctggccgtcatcggcatttctaataagccgcccgatcaagaccatcctttcgggcatggcaaagctgagatcatcagcgaagcgattgtaggaatcatattagtgctcgtttccgtgtatattctgatagaagcgatttcgtcctttgttgaaggtccaagcatcccgcaatacagcgcattgtttgcggctctgatatcctacgtggctaagcagatcttatatcgttattcgatcaaacaaggggaaaaatggaacagtaaagcgattatagcgattgcatacgatcataaaggcgatatcgttgcctctcttgccgcttttatcggcgtcctattggcgattatcgggaacacacgcggatggtcctatctgttgtacgccgatgcaattgccagtgtcatcgtggcgtacctcatttttaagatttcaatggaattaatcaggccgtctgttgacgttctcatggaaaaaagtgttgatcccgaactgatagaggaatataaagcggttattttggattgccctcaagtcaaacggctcgataaaatccgagcaagagaacacggccactataaattgcttgatgtccggttatctttggatcatgatttgacgattaagcagggacacgatatagcccgggaaatccgaaatgaaatcaaaagacacttttcagatgttgaagaagtgctcatccatgtgaatccttattttgaagaatgaaaaagcagcttgtagagaaaacgatgttttttctacaagcttttttgttttgtgctgtttctttacatattcgtttgatttcactgatccatatgctttctgataaaatgcagcagcgtgtttccttgagcggtcaatatgacgcccttcgcgctgcacttcggacagggcgtcccttctttctcctcgccggttccttcacaatgcggacatgtgagctcaagatcgtcggttgcgatcaccatgaatatccctccttttttgattgtctgtccgtctccagtcactttccatggccatcacctccttaacaacgcaaaaaaaccccgtccatcaaaggacgaggttttcgcggtgccacctttattaacggctgaagagccattctctcaaaaagtacagaaactcagggtttcaatactcctatcttgataacggggaaagaatcccggcaccgcctactgttatttcagcgcagcaattcagaagcccattcggcaccggacggggatcggttcacagcggccaccgactctctgaaccccgcgcgctgatgcgtacttactcttcctcagcattgttcatccgttctatgattttaaaatgtatcatacgctgtcatccggcggaagtcaataacctttcggatcggacagtccgagcatgtcccgcgccatttgcatatgctcctcttgccccgtctgaagcgcgaacttcgccgtttccacagggtaagcggcctgccattctgacacatgctcctgcattttcggccagacgcgcccgccctcagcttcgtagctcttcatcagccgttttgtttctttttctcctaatatcacttgataaaggacaaaatccttggccggatcggcaacctttgcctccgtccaatcgaggagacccgtcacacgctgattttcgccgatcaaaatatgcggaggatgcaagtcgccatggatcagcgcagaaaaatcaggccagtacgagctgtcatttatccacgtttgccatcttttccaaagctgttctgaaaccccgatttctttttttatatgatccattgattccgccgccctttgcctgacgtcatccggttttatgatttcaattccggatctggaggccgcatccgtgtctgccccgtgcagcccggctaatgctgcggcaagcgagccgacaaaaccgtctgaaggcggctcgtgttccatattccagacatactgtttcttatccagatcaattgcggcagccggtattccgtccagtttcggataagcgatcagttccggtgtatgaatccgccaatcggggactgatacagcggcatggctgcggagaaacgcgagaacatcgctttctgcagccgctctttcgataacatcgggacggcgcggctttcggagcacccatgtcacgccgctgtcatcttcagcaaatacgacttggaagtccatacccgtttcatttatgtccgccccttcatattttaaccgtaagccattttcctttgcgatgttcaaaacggattctatttccctttgtttttttgtcatcttgtttccccatttcccttattgactgacacagagcttcgcctttaggcggagaagaaagagatgtgtgaagacgccaaaaagagggcggcataatcgccgccccctcactattactgtcaggttccttattcaggcagacaatcccggtttcctccgcgctcaaggcagagactttgacactatttcattagtgcgaaaaccggaatttgatcagccatcaggatccctccgttccttcttagttaacattattttacacaaaaaccttatatacgtaaaccctatttatcagcttaccggctgcctccgctgacaaattttgatccttcgcgtaaatctttcgcctccaaaaaaaagacgtgaatgaattttttcatattcactttaaccggagaaagcggcacggtttccttggcctgcatttctttcattctcttgctgacagcggggaaatcaaagaatttcgaggcgtaatattcaaatttggggtttgaaaaatcagttgtgcccaatgaagcgaaatggtttaacgaatgaatgacggcccttctgatccgctgttccgaggctttgatttctctgttaacctcggcttgtgccgccgcaggtcccagcttccggatggcggcgtttgtaaacatctgctttaaagacgggatgtttctttccgcctgttcatcctcaaataaatagtgaaggacggccatgaggtcatgcgccccgctttctcccacgatgcctaattccgacaaaagaaattttcctgtttctttgattgatttctcgtgcatcccccccggcccgctttttttcggctcattccgctgaataagacggcttaacgagtgttggatgtcgccgatcgaggtttccagttcaatccgctcttttacttttcgcaaaacggtgacgatctcgattttgttgatcggtttatggataaagtattcgatgccgagagaataagcttctcccaccatttcctttgcctccacctgcgatatcatcactgcttttccgttgtacgccccctgaagatgccgtatcgtctcaatcccgtcccggcccggcatcagcagatcaattaataaaatatcgacttgtttgaaatggagataatgcccttcaatctggcttccgtcctctgcctcaccgacgacttctcctaagtcctcgtcctcgatcatctgttttaaaatggaacggatcgcccggtcatcatcagctataaaaaaacgcatattatgagttcatcctttctgcaatcaaatgcttcaccggcagcttaatcgtaaatatgacgccttttggcttgttatgaaaggaaatgtctccgtcaagttcggttacgatttccttcacgtatgaaagcccgatgcccgttgaaggtgcgccgaattcatcgtatttggacgtaaaaccgggatcataaacgacctctccgattttttccggaatgccgggaccgtcatcttccgcctcaaattcggccatccccccctccgccctgcgcagcgcgaggcggatctcacccctgtcacccatggcttcgacggcattggcggtcaggttatttaagatcgacaggacggtaaagacgtgataatcggggtgttctccttcaatcacgtttttgaattgaatgtctttgcctaaagattcggcgtatttttcattgatgcggataacgaggccgaccagatcggcggcattcatgtaatcccggaatctctcatttgaaatcagcttcgacaggccggcgaatattcgctgattgtcttttttcacttcatgaatttctcccgcaaggcgcagcattcggctcccgagctcccggtcgttcccgctcatttcccgatacagctgataggattctttcgtcacatgctccgtcgttttcagcgtttttttcagatgaatcgtttcttcatataagttagacacaatcatcagcatgtgctcatgctgctttctcgtttgtttttccctgacctgagattcgtgcagcttcatcacgttgaaaaaactcagcacaataaatgtgtgagaaacagcgataaccgcaatatccgccagcttgtccggcatcataatctgcttgccgccggaaaactgaaccgtcatttcaacggcatcggacgccatttcaatgagaaaaccgagaaacccgatcatgagcggccgatcccaaaaaagcctgaccttcagcacataaaacaaacaggcatatgtaaagtaaaaaaagaaactgggatattggctgaaaaaagccgccgtaaatccggcatgctctcccccccagcacgccaggccgatccggaatcccacaacggctgcacctgtcaacagccctgacaataccgccggcacatgccgaagcagcagaagaaaaaagaaaaaagccggggcgccgaagctgatccgatatacctcattcagggggtaaaatttcagttcccccgccagcggcacggtgatcagcataagagcgaaaagatagccgtcttttttcagtaaatagtcgagcctgatcataatcacttccttcttctgtctattttgaacaagaccgatacagtccgcaaatttctttagacccgaatggcgggacactccggctgatttataaatctatcggcttattttaagaatgattttgtcgtattttgtatgattctgtagatgtcattatacattaacatggaacacgctatttttgaaaacgttttccaagaccggtttccgcttcggacaggcttgcaatagaggaggaatgttatgaaagatatggtcagagagcgccttgaaaaagaggaactggcttcacttttacaagattgggtcgagcattaccgaccgttttccgtcaatggaaaaagcgcaaattatatacccgccctcggagaaatcaacgactctcagctgggcatttgcatattagagccggatggctcaatgattcatgccggtgaatggaatgtgccgttcacattgcagagcatctcaaaagtcatcagctttattgccgcatgcatgtccagaggcattccttatgtgctcgatcgtgtggacgtggagccgacgggtgatgcgtttaattctatcatccggcttgaaatccataaacccgggaagcccttcaatccgatgatcaatgccggcgccattaccgtcgcctcgctgcttccgggtgaaacggcgcataataaattagaatatctcttttccgtttttgaaaaattaataggaaaacggcctcacattcacgaggaggtcttccgttctgaatggcagaccgcgcatcggaacagagcgctcgcctactatttaaaagaaacgaactttctcgaggcggatgtggaagaaacgcttgaagtgtatttaaagcagtgcgccatggagggtacaaccgaggacatcgctttaatcggattgatacttgcccatgacggctaccatccgatccgacgggaacaggtcattccgaaagatgtcgcgaaactcgccaaagccctgatgctgacgtgcgggatgtacaatgcgtcaggcaaatatgcggctttcgtcggcgtcccggccaaaagcggggtatccggcggcatcatggcattggttcccccaagcgccagaagagagcagccttttcataacggatgcggcatcggcatttacggtccggccattgatgaatacggcaacagcctgaccggcggcatgctgctgaaacatatcgcacaggagtgggagctcagtattttttaatcaaacgaaccaagaggtgattggatgcaggaattccttgaaaatgtaatcggctcggcaaatgattttttatggtcaaaactgttaatcgtactgcttctttctctgggactgttttttacgttcagatcaaagggtctgcaagtccgcatgctgaaggaaatgatccgggttttgaaggaaggcgcggccgcccggacaaaaaacagcatttccccgtttcaggcattttgcatcagtatggcggcgcgtgtcggaacagggaatattaccggaatcgccattgcgatcgcactcggcggtccgggcgctattttctggatgtggattatcgcagtcatcggttcggcttcaagctttgttgaaagcacgctggcccaaatttataaagtaaaagatcaaaacggattccgcggcggcccggcctattacatggaaaaaggcctgaagaaacgctggatgggcgcgctgttcgccgtattaatcacactgtcattcggggttgtttttaattccgttcaatccaatacgatcagcgtcgcctttcaaaacgcgttcggcaccagccggcttacattgggcattattttaatcttggtttttggcggcgtaatcttcggcggcgtcaaacgaattgcgaaaatggcggaatacatcgtagtcgtcttggccgttttatatatcggtgtcgctttctttgtcattctgacgaatatcacccaattgcccggcgttctgtcgctaatcgtaaaaaatgcgttcggcattgatcaggcagcgggcggcgctttaggtgcggccttgatgcaaggtgtaagacgcgggattttctcaaatgaagcgggtatgggaagcgctccgaacgcggcggcgacagctacgacgagccacccggtgaaacaggggctcattcaggcattcggcgtcctgacggatacgctcgtcatttgtacaagcacggcgcttatcattttattttcagacgcttatcaccagccgggactgagcggcatcgcgctttctcaggccgccttgagcgaccatgtcggcgcgtgggcgtcaggtttccttgccgtcttaatgcttttgttcggcttcagcgctctgatgggcaactattattacggagaaaccaatatcggatttttaagccagaacaaaaagtggctgttcatttaccgcatctgcgtgctcggaatggtactgttcggctgtatttccaaagtccagcttgtgtgggatatggctgacttgttcatgggcttaatggtggtcgtgaacttaatcgcaattttccttctgtcgaaaaaagcatttgccgctttgagcgattatgcccggcaaaagaaagccggaaaggaccccgtcttttacagagatgtgctccctgatgacgacgggatcgaatgctgggagtattcagatatcgcgaaaagcgcgaaaggcaaacatatttcctaaacaaaaggtgttcaggcagcgtcctgaacaccttttttccgccggttcattgacaaagagaatagcgtccattaccctttttatatattttcagtaaagtcagaaaggaaggcctatgaatcccattacacaaatattaaatgaatacccggttatgatcatagacggcgcgatggcaaccgagcttgagcggatgggctgtgatttacatgacgatctgtggtcggccaaaattcttttggagagacccgaactgatcaaacaggtgcatgcagaatattttgccgccggcgctgattgcgcgatcaccgccagttatcaatcgacaattgaaggatttgcagcgcgcggcatcccggaaaccgatgcgatacgtctcattcagacatctgttgaacttgccgcacaagcacgcgatgaattttgggcgcatgaagaaaaccgtttacaccggcctaaacctttggtcgccgcttctatcggaccttacggcgcgagcctcgctgacggctctgaatatcgcgggcattacggactgacggaagatgagctgatcagctttcaccgcccccggatgaaagccctcatagaatccggcgccgatcttttggcctgtgagaccattccgtccctgtcagaagcaaaagcgatcacaaggctgctggaggaattccccggcacttatgcatggatcagcttcagcgccaaagacgggcggcatatcagcgaaggcacgcctatttccgaatgcgcggccctgcttgactcctgcagccaaatcgcagcgatcggcatcaactgcacaccgatcgaatatattccgccgctgatagaagaaatcaaacgggcagcatccaaaccgattatcgcctatccgaactccggcgaacaatatgacccggtgacaaaaacctggaaaggcgcagcgtgcgaaaaccatttcggaaaaagcgcgcaaagctggtacgaaaacggcgtgagcctgatcggaggctgctgccggacgaaacccgcggacatccaagccattgccgattgggccaagaccttaaaaacaacttgactaatcggaatagtttgtatattctattcaaaaagccggttcgccggaatctcgtgccgttcgccggcatgagattttttattagaacggccctcgcagaaagttggaaaacaatgaacaacaagaacgagacgaattttcagagaagtatgaaaagcagacacctctttatgctatcactcggaggtgtgatcggaacggggctgtttttaagctctgggtataccattcatcaggcgggtccggcgggcaccattttcgcttaccttttgggcgcgggcatcgtctatcttgtcatgctttgcctcggtgaactgtcagtggccatgccggtgacgggcgcattccacacctatgcgaagacctatatcgggcccgcgacgggctttacggtcgcatggctgtactggctgacgtgggcggtggcgctgggctctgaattcacggcggccgggctcttcatgcagcgctggttcccgcatacttcagtttggatgtggagtgcggtattcgctcttttcatctttttattaaacgccttctccgtgaaattttttgctgaatcggagttttggttctcaagcattaaagtcttagccatcttactgtttattttattgggcggagcggcgatgttcggcctcgtcccgatgaaaagcggtgaggccgcacctatgctgtcgaactttacggatggcggcagcctttttccaaatggctttttcccgatactgatgacgatgctttcagtaaacttcgctttttcagggacggaattgatcggaatcgccgccggggaaagcgccgatccggaaaaaaccgttccgcgcgccattaagaccacagtctggcggctggcgcttttctttatcggaacgatttttgtgctgtcagggatgatctccatcaaggaagccggtgtgattgaaagcccgtttgtcacggtatttgacagagtcggcgtgccttatgcggccgatctgatgaatttcgtcattttaacggcgcttctgtccgcggccaattcagggctgtacgcgtcatcacgtatgctgtggtccctgtctaaagaaggggagcttcatcccgcctttgccaggctgacctctaaaggcattccttttaacgctctgatcttcagtatgatcggcggcattctgtcgttgttgtcaagcgtatttgcagcggatacagtctatcttgttctcgtctccgtctcaggatttgcggtagtggctgtgtggatgagcatcgccgcatcacaatttttgttcagaagacgatttcttaaagaagggcaccagctttcagacttgaaatacaggacgccgggatatccggccgtaccgatagcggcctttctcctatgcctcgcctcctgtatcggcatcgcttttgatccgaaccaggccatcgccctttattgcggaattgtatttatggccgtttgctacaccgcttattacttgaaaaaccggaaaagcagagcccgcgtgcaagccgtaaaatcccaataaccaaaaaaagaaccctgcggcgcaagggttcttttttcatttatacttcaacgacccatctgaacgaatcccgcaccttcccgacttggatgccggcaatcgtttcatagagcttttctgacacttcaccgatcaaaccgttattcagctcaatcgtttctccgtgaatgtgcagcgcgccgaccggcgagatgacggccgcggttcccgtaccgaatacctccgacacctcgcctctcattgcagcctcatagatgtcatcaatggcgacctgttcttccctgacacggatgccccagctttttaacagctctatcacagatgcgcgtgtgatgcccccgagaatgcttccgtttaacgccggcgttacggcctctccgtttatgatgaaaaagatattcatactgcctacctcttcggcatatttcttttccactccgtcgagccaaagcacctgatcataccccagttcttcggctttccgctgagcctgtaagctggccgcataatttccggacgttttgacgtcgcccactccgccggtgacggcgcgcacatactcatcctccacataaatacggatcggtttcagctgatcgccgtaatacgaaccgaccggcgtcaaaacaaccatgaacttgtaacgctttgaaggccggacgcctaaagaaggctcagtcgcaatcacaaacggacggatatataaagaggttcctttttctatcggtatccattcctgctccagctccaccaattgtatcaatgcttccagcgccagcttctcgtcaagaggtggcatgctcatccgccgtaacgatttattcagccgttttatattttggtcaggacggaacatcaacacccgtccgtcttctgacctgtaagccttcagcccttcaaatacggcctgcccgtaatggaaaaccgatgcggaaggatccagatggaccggttcataaggtgtgattctcggatcatgccaccctctcccctcttcgtaatccatgacaaacatgtaatctgtgaagtacttgccaaatcccaatgaagcggaatccggtttttcctttctagctgtgaccttacgtctttcaatcagttgattcaacaaaagcacacctttcttctaattgttcaaattttcagtcttttctgggctgcatgttttttctgtcccgaatcttgtatgcacagatatatgagaatgcagttgaccatatcatatcaaatataccacttataagaggataattatcaaaatttttaatattttcagcggaaatctttctttattcttatgctccttcatttttttcaatgaggactttctgtcatattcaatgattgcgcttacataatgtaaagcaatccttcctttcgcacagtcaatcatgtgacaaatttatggcggacaggaaggtggttgccgcctgcttcacgaattacgtaagaaatgcgcaagtaaaagggggattcgcttgaaaaaatttatcgcattccagattttgatcgctttagccatcggagcattgatcggccatttcttcccggatttcgggatggcgctgcggcctgtaggagacggatttatccgcctgattaaaatgattgtcgtgccgatcgtgttttcgaccattgttatcggagccgccggcagcggcagtatgaaaaaaatgggcagtctcggcatcaaaacgattatttggtttgaagtgattacgacgctcgttctggcgctcggtctgttattggcgaacgtgctgaagccgggagtcggacttaacctctctcatcttgctaaaaaagacattcacgagctttccggctatacggaaaaagtagtcgatctgaaacaaatgcttcttgatattatccccgttaacatcattgacgttatggcgaaaaatgatcttctcgccgtcatttttttcgcgattttattcggtgttgccgcagccggcatcggcaaagcctccgcacctgtcatgagtttcttcgaatccacggcaaatattatgttcaagctgacgcagatggtgatggtcaccgctccgatcggcgttctcgccctgatggccgcctccgtcgggcaattcggaatcgcgcttctgctcccgatgctgaagctgatcggcactgtgtttctcgggctgttcctgatcctcttcgttctgtttccgatcgtggggcttatctttaaaatcaagtactttgaagtgctgaaaatgatttgggatctgtttttgatcgctttctccacgacaagcacagaaaccattctgcctcagctgatggatcggatggagaaatacggctgtccgaagcgggtcgtctcctttgtggttccgtcaggtttatcgcttaactgtgacggttcaagcctctatttatcggtgtcctgtattttcctggcgcaggcgtttcatgtggagatgccgctttctcagcagcttctgatgatgcttgtgctcgtcatgacaagcaaaggcattgccgccgtcccgtcaggctcactcgtcgtgcttctggcgacagcgaatgccgtcggtctccccgcggaaggcgtcgccatcattgccggtgtcgaccgcgtcatggacatggcgcgaaccggtgtcaacgtgcccggccatgcggtcgcctgcatcgtcgtatccaaatgggaaaaagccttcacatataaaggacccgtcacggcagatcagaccgcccggacagaaagtatgtaaacacaaaaaagaccacctcattggtggtcttttctattaatcaatcgccgcatgatcctctttttcaatcaaagcaaggcgttcattgatttcttcctgagtcatttcgtgctctttcacatacatgtttcgttcgttcgtacggcattcgtgactgcagctgcgcatgtatttgtattcattctcaggtgtgcagatcatttttttattacatgccggatttgcgcagttcacataacgctcgcacggctcgcccgtgaaataatcttttccgatgataacgtgctctacgcggttgaccggtacgctgattctttcgtcaaacacatagcactgtccgtcccacagctgcccttgcacttcaggatctttaccgtaagtgacgataccgccgtcaagctgggacacgtcttcaaatccctgcttcagcagccagccggaaaatttctcacagcgtacgccgcctgtgcagtacgtgaggatttttttgccttcaagcatgtctttgtgttcttcaatccagtccggcagctcacggaacgcctcaatatcaggtctgaccgctccgcggaaatgaccgaggtcatactcatagtcgtttctggcgtcgatcacgatcgtgtcaggatcctgcatttgctcataaaagtctttcggtttcaaatgcttgcccgtcgtgacattcggatcaacatcatcttcgagacgaagcgtcaccagctcttttttatggcgcacaaacattttgcggaatgcatggccgtcagcctcgtcaattttaatcggcatgtcggcaaaacgcggatcagctttcagcgcattcatgtattgttccgtctgttcaaccgttccggacaccgtgccgttaatgccttcctcagaaatcaaaatacggcctaacagaccgagctccttacaaaacttcaaatgctgagccgtgaactcttcaggctcatcaatctttacatatttataataaagtaaaactctatattgtttttccatgatttatacaccctgttcaattatattaatgatcacgcacactatactatatcatacaggaaaacgggcgaaagatgaacatttccgtccgtactctttcttccagtcacgcttcgccttttaaaacctgctgaaaataaaaccgatacgtattgcgcaaaaaggtctcaagcgaaaggccggccgcggtctgatacttgccgataataaacggaaaacggtcacggccttttgcccgcagaagatccgcgctgtcttcagccagttctgagatgagcgcctcaacgacaggccggcatgcatcccgcaccgcttcaagaatttgctgatcgcctgtatgccgatactgttcgatcagctttcccaaatccttttcttccataaagttcacttccttacaccatataaaaaagaggagcagcttttataaagcggacgcctcctcctgtgactccgcataaccgatgatctgaccgacctgtaattcacggccttcagtcaggttatccgaaggggtaaacatatctttctcgaatactaaaataacggtcgatccaaatgaaaaatagccaagctcttcccccgtctcaagccggtttccggtgtttgtctgaacgatcgagttaatattcatcgcacctaccggaatcatgagcatctgctgatcagcacgggtcagctcgtacacataacggtaattttttgagagcacatctttcccgtactttaaccccatcgtattaacgggataggagcgtttccccagctcggccagctttttatacgtgcagctgacgggagaatggaagcggtggtaatgtctcgggctcaggtaaagcacggcaaaacacccgccgttatacttgtgatcggcgcttttaaaccccgtcagttcggcgaacgaataatccttcccttttaccatgaaagtttgattgggattaatcatgcccaccgtctgaacgacgccgtccaccgggctgacgatggcgttcttctcttttgccacggggcggagattcaaattaatatcacgaatgaaaaatgacgccagtgaatcaaagtcagaagccgtgcgttccgtttcattccagttaatgcgatagtgtttggaaaacagcggaatcatcggcttgctcagtttcgattcacagaagtttttaatgagataagacgtcaatcgattattagtcagttcaatcaatgaacggtaaagaactttagcggcagtattaaacattgattactcctatgaattttcctatagtaataaaaataaaacaccataaaaacgctccgatggcggcgaagcataagtaggttttgaattccattctgccgattccggaaaagtagcaggtcacgtgtctgatgccggggatgaaataacctaaaataatggtgtacggcccgtacttcttcatccacctgtctactttctccatcctcttttccttcaggccgacccatttcccgaacttattaataaacggccggccggcttttctgccgatgaagtagctgataatcatcccaaggagcgctccgataaagctgatcagaatggagagcccgtaattcagcacgtttaaatgagcgaagtagcccacaagcgtcatcatgacttcatccggaataggcaatccgataataccgagtgtcagcataagaaaaatcgcgatatatccgtaatcggatattaattgctgaactaattccatcttctgctctccaggttttcaggcgcctgttttttaaagtgcggaaatttaatgttgctgaccattaaataaccgagcgcgatcgttcccgcccccagaagaaaagcgttattgataaagctcaaaatgacaagacacatacccgcaaacggaatcggcatcccgataaacgtcggcagcttgctttgttcaatattaaatctggaaagacggatcatcccgcagatgctgtaggaaagcgcgattaaaattccgatgaacggaagcgtatatagtgaaacactgtaagcgagcatggacggcgctacgccgaacgtcacgagatcagcaaaagagtcaagctcccttcccatctccgataccgcgttcagcttacgggcggccaaaccgtcaaagaaatcaagaaacatcccggtgaaaataaagatcaccgcagagtgtatattatgatacaaaagggaatgaatcgataagagcccgcaaataaaatttccaattgtaatcatactaggtatataattcacagtttacacaaacctccaattaaaaccatatcaaatcggactgcgtatgcataaagactccattttacggaaacataaaatgaaatcctttcaatgctatcattcaaattcttttattatacagcatttggtgttatttgaacaatctaatctggtgatttttgttttttcgccgttcatattaaggtaagcaatcatggtttcctctattccggattaccctgcttaaatattccatgctgcgatccggattgtccgttcttgatgaatgaaaagccgtatgatgtattgttatttccttctccgtgaaatgagaacattacatataacgattgcggacataaaaagtttcaagaattaaaaaaccggcacaaaacggcctcatacattatctcacaaccccgttttccagtatatagtctgtccaaacaaaaaaggcgccttaccattacggtaaaaacgccttttaagatcattttatgtaattgataaatgactgagtgcttcggccgctctttctctggcctcttcaacggtctcggctgcagaaagcgcaaccgccatacggcgtccgactttcgtgacgggtttaccgaatacgcggacctgagtgctttttaccgccaaagctttctccaaaccttcaaccgcataatcagcaagctctttgggcgccttcagcggacggcttgcccccggcgacagctgaatgatttccggaatcgggaatcccaagaccgcgcggacatgcagcgcaaactctgacaaattttgcgtcacaagcgttacgagccccgtatcatgcggacggggagacacctcgctgaaatatactttatcttcagtaaggaaaagctccaccccgaacaaaccgtatccgccgagctcatccgttatgcttttcgcaatgtgtttcgcctcttcaatctgctgttccgtcatatgatgaggctgccatgattcaatatagtcaccgtctttttgttcatgtccgatcggcgcgcaaaaggacgtaccgttcgccgcgcgcactgtcagaagagtgatttctgattcaaacggaatgaattcctcaacgatgacccggccgtttttcacccggccgccttccattgccatgtcccagcagcttttcagcccggaagccgagcggcacacgctttgcccttttccggaagagctcatcagcggctttaccacgcacggaaagccgattgtttccgccgcttctttaaattcttcgtatgtattcgcgaattcatagccggcagtcggaagatgaagcgtctctgctgcaagccgtctgatgccttcacggtccatcgtcagctttgccgcacgcgcattcggaatgacgtgaaacccttcttcctcgagcttcagcagctcatccgtcgcaatggcttccacttccggcacgattaagtccggtttttctttctcaatgacttctctgacctgcgctttatcaagcatatcaatcacatagcttttgtgtgcggcctgcatggcgggagcatgctcatagctgtcaacggctacagtgacaaccccgagccgctgcgcttcaatgacgacttctttccccagctcgcctgatcctaataacaacatcttcttcgcctgatacatgtcctttggcccctccctttctataccccactcattataacggaaatattcaaaaaataaagacaagacagattacaagctctatcctgtcttttgtgctgattcgagcgattcaatcgccgctgacacgtccttcccgcaatattgccccattaagcataacgattcttccgcccggcaggcgtgagaagcgatgcggcgctttgcttcctcatggttgtcaaggatgccgagagcacagagactgacggggaaaccgagccggcggtaaaacggaagcagctcttcaatctcatgtctccgattctcaagcgcgagctgcaccaatatgccgtaagcaaccttctggccgtgcagcacctgatgtgtctcctgaagaaaactgaggccgttgtggaccgcatgcgcccctgccatcctgcacaaacggccgccatacccgccgaccgttctcgcaagcataatgatcgtttccgccgtatggatgaacggcacggacagctcgcctttctccatgcttacgacggcggcttcactgtaacgcaataacagattacgcatatattccgcctgtctcagccccgcctgcgccatcagaggcggcgcttcctccgtatttctgatgaccgcctcggcctcataccatttcgccagcgtatcaccgatcccgcttttcatatattcaatgggagaggaaagcaaaaacagcggatcaacaagcgtcaaatagcttgaacgcttgtgataatcaactctgataaaattgccgctctcatcatatatgacactcaacggcgtacttgccgcacacgtccccgcaatggaaggaagcatcacagcctcaatatcaagccggtctgccgccgcttttgccaaatccaaaatcgtgccgcctccgataccgatgatcacatccgcgtcttccgcctgcccgcagaccttacgcaccgcctcaggtgaacagtatcctttgtgctgaatcacatcccaggaagaaccgccgccgtaatcggagaacgcctgataggatttgattccggtcacaataacgggttttctgaatgtctccagcagccccggaagttcttttgcgattccttccttgcatatgtactgattcgggccgcttcggacgatatcttcaggcttcattcgaatctctcctttggctggaatttatacatattttctcacttgtcagaaaatacatcaaccggaggtgcgtcagcgcttcgcttcctccgcctccaaaaacagctcatcaagccgctccaaagcttctgccttttcaaaactgctgaaccacagatcatcataagaatcaaggatgcggtaatgatgggaaatcaaatgctgctgcaagcggaactcgccttttttctcgatggctttccaccacaccttgccgcccatcgtcttccccttcggcctgtcaattgtgcggtgagcaaccgtttcaatgacctccagcggatcatctcctaatacggattgcagtgtttcacttgatctgaaaagcgcgcaaaccgccacaacgtgcggccattccgcaagcgcccgccctttctcaatctgcaccagcgactttttagaaaggccgatcacatccgccattttctcctgtgtgtagcctctctccgaccggattttcttcagctggactgagacaagctcagtcatataatcttgatccatctcaacctccatttttatcaatatagccattttacaccgcggcacgccttttttatatcagaacattttcaaacaaatcaaaaggacccgggatcggcttttcattgaaacgatgtacctttccgcataatccagaatgatgcggtgaatacaaacgtacgcccgaagagacagatgcggtctccctggcggttgagctccggagaaaataaaaagctgccgcagctgcggcagctaaaacattataagctgaaaatcaaaattatgaagcgaatacaatccaactcgcactataattgacacgttttttcgaaccttgattgaccattttaaatctgtatgaatctcctttttttaacaaaggtgtttcaaaataagtcgttccatttttctttgcattggcggttttgattgttttccaggcacctttgccgttgacttgcttttgaacgtatattttatacgtgcccttccctttactgttggatttaaaagtcacggctctcaagctgtacttttttgtcgtcttagtgaatttaggatgatatgtattgatcacatagttagtgaaatacccgcttttataagtatgaagccagtctttagcctctgctttttgcggagaagaaaaacccataaaaccaattccgctgattaaaagagtaaaaataatgatgagcgacttaaaaatctttttgcttttcatcgagaaaatccttccttcctgtaactatttaccctatttatgttaatgacaatatagctaatcataaatccgtccaactaaccattttgactgcagggagagatgaaaacagccctgaaaatgactatatgactactacttatgattcttgttatttttgattaagtgataaagttactttaaagcgctatccattttgctgtttttgtatcaattgtcatagagagatcttttcctatcaatgcctctctatcggcgtttgtatgatggggctgtcctcggacaaactcctgcacccatgacaaactgtcatacgtttgccacctatgaatgaacgcacactacacgtaatggagggattgcaatggacgaaatggtcctggaaacacaacaatggctgaatgagacgtacaaaggcagacacgggtacaacaaggtgccggaaaacggaaaaacaggctgggataccatttacggtctgacacgggcgcttcaaattgagcttggtatttcagaaccagccgataacttcggaccgacgacacaaagattgtttaaaccgttgaaaaagcaggctcccgattctaagccgacaaacatgaattacattctgcagggggcgctgtggtgtaaagggtttaacccgggcggattttctggcgttttctatgaaaataccgaaagcgctgtaaaagagtttcaaaaagcggccggacttactaagcaagacggcattgtcacggcactcattatgaaggctttgctggatatgagcgcttttcggttagtagcgggaggcgacaaaagaatccgccaaatccagcagaacctgaaccgggattacaatgactacatcggcttgatgccttgtgacggcttatatgcccgcgatacaaacaaggccctcatctatgctctgcaaaaagaagaaggcatgagcacaagcgtcgccaatggatttttcgggaacggaacgaccagcttatgtcctaccttgactcccggcgattcacggacaggctttgttttgattgttcaatacgcgctttactgtaatgggaaatcatttgaccccggtgaattcgacggaaaatacggcgtcggagttgtatcggcagtgaaagctttccaagaatttatgtgcctgccgcagacaggttatgcggacatgccgacgattaaagctttattatcaagctcaggcgacacaacgcgggctgcttcagcttgtgacaccgctgccattttgacggcagatacggctaaaactttgcgtgagaatggctataagatcgtgggaagatatctgaccgggaatgtgcggactagcagcggactgacatcgaaagcgttaacgtcaaaagaactttccgcgattttcaatgccggcttaagcgtgtttccgatttatcaggacggcggctatgaatcttcttattttgtaaaagaccaaggaacgagagatgcgtacagcgctgcatcagccgcccgaagattaggttttccgtcaggaacgaccatttactttgccgtcgattttgatgcgtatgattatgaagtcacggataaaatcatcccttacttccaagaaatcaagtcagcttttatgaaaatgcaggcgttctcaactgcgccgaaatatgaaatcggggtatacgggccgagaaacatttgtatccggacgtcagaagcaggtctgaccaaatatagctttacggctaacatgtcgaccggattcagcggcaacctcggatacccgatgccgaaaaactgggcttttgatcaattttatgaaggcacgatcggaagcggagcgggaaaagtcgccattgacaaagacggatactccggaaaagactcgggtgcaagcagcgtccatccgccttctgatcccgtgtatgatgcaagactgcgcacactgacggacattttaacaaccattcctgctttagaaaatatatcgaatcttgcgaatgccatgtttgaattcgacaagacagaaaccatttatgcatcacctgaaatggatattcttttatctacttcacttttggcaacagtgccaagcgaaggttctcccaacacagttaccattacaaatggcaaaccgggagcttatattaccggtctgatgggagattcacaagtctcttttacagcatcacaaattgattcgtatcaaaacctgcttaacagtctgagcttgtcagtgcgcaacggttatttagaagtgtatgtcaatccggctgcgggatcgctgaatattcaatttaaaatttatacacctgatattccggtcggtgacagtgctactactggactaacaactaccattacatttaaaataaaacaaaagagcttcagattgccggattccgaagaggtgtactctccggattgggattctgtcgtgaataccatggctattgcaggcgcaggaattattgttattgtagggatcggtgctttagtcgttttagcacctgaattaggaggagctgcagccttgttcagcacagttttatcactatttctataattgaacaggcagctccttgctccaggaatgctcaatgagtattcttggagttattttttaaggaggattcgtatgaagattgatatgcagacatacaaggacaccgttcaaaaaatagaaaatgatttgattccgcgaagtcaaaatgacaaagaactgcttacatatttaatgaaacaagattcgctcacactgaatcaaatgaaaatgtgtttcactgaaccgctcctcaccttccaacatactgtcaaaatcgtatgtacagtcacattcatcacgttatatatcttttttttcagcactcattttaatgatttgattgaaatggctctgcagatggtttttggcctggccggccttgtttggatttttgctgtatttccgttttcaaggaaaatccaagtgtctgaccgtttcagacaaaaatctgaaaacacccgtatcaccggaatgatagactttgtcctcgaacaacgatacaaagacatgatcagttaaaaacccctctgcttaaggggtttttttatgatgcaatcccttcaccccccttatcaaaaaaggctcttcccctttggaaataaccggaacacccaatttcgttttcaatataatgaggtagtggatctgcaaagaaagaagggcgacatgatgggtatcattaatggcaaaatgttcattgaccgattaaatcagctaggaaatgagatttggcttgatggtgaaaagatcgagggacagatttctgaacatcccgcatttaagggccttctggaaacgaagcgctctctttatgatttgcaaacgaaaccggacatgaaagatcaaatgacttacagtcttcccggtaaaaaagaacgggccgggctttcatacctgcagccgaaaacgaaagaagacgtaaaaagaagaagaaacatgttcgaacattgggccagacacacgcacggaatgatgggacgaagcccggattatatgaataccgtgctgatgagcttcgcctcctctgccgcgcttttgaaagaccgtgatcaatgttttccggaacatgttcaagcgctgtacgaacgcgctgccgcacaggatctttcttttacgcacacgtttatcacccctcaggtgaatcgttcacaaatgggtgtaaacgtatcgccgacacctatctcggcaaaagtcgtcgataaaaatgaaaaaggccttatcatacacggcgcgcggattttagccacacaaggcggcctgacggatgaagtgctcgtggtttctctgcctaagatgtattttgaatcggatgaagcgttcgctttttcaatcccttccaatacaaaaggagtaaaattcatctgcagggaatctttcgtactcggaaaatcatcgtttgattatccgctcagctcaagatatgaagaaatggattctatcgttgtatttgatcacgttttggtcccttgggaacgcgtatttttttataataattacgaggcggcttttgattttaatatgaaaagctcttttaacgccttcgcatttcatcaagttatcacgagacaaattgtaaagacggagtttctcctgggcctcgcccaaacgcttgtcgatgcgatagatgtgggggaatatcagcatattcaggccaagatggctgagatcatcaccggtctggaaacgatgaaagcccttttggaaaagtcggagaatgatgcggaaacagacgaatggggttatatgcgtccgagtgtcactccgcttcgcgtggtcagcgcgattttccctgacatctacccgcgcttcacggaaatcatccagctgatcggggcaagcggaatggtgactttgccgactgaaaaagcgttccgttccgacatcagaggagaccttgaccaatatttacaggcggccgaattgaacgctgaggaccgggtaaaagtgttccgcctcgcatgggatttgaccatgagcccctttggaacaagacagacacaatatgagcggtacttcttcggtgaccccgtccgcttagccagccatctgtacagaagctatccgaaagaagaacagaccgcggtcatcaaggaattcctgcacattcataaataaaacaaagcagagaacgcatctctgcttttgatagctggatcggctgccgccgatcctattttttgttttggctgatcaccaccatcgtaatatgcgataacgcgaaagagacgagcgtgtacacgacggcccacccgataaacgagaaattcaatatggtaaaggtgcatataaggcaaacggctaaagcggcagccggcataatgaacgcgtttttaaacaggtacgttccggcgactgacaggatgatgatacaaagcggcagaacaccgaacgcaaaatccaattcatcaatcaacagatgcactcccttcgcttttcttagttcggcctaacacatcttatgcctgagtacaaaatcgagtacatcaaatctttcgcgctccggctgatattccctccggttatttattcaaaaaaatgaaaactttccttaaagcgtttacattcacgccagactgtgataatttaagaaagcgctatcatatacaagttaatgatttttggatggagatgaggagaaccaggaaaccgcgccctttcataagggtgatttctggttctttttgtcattttcaaggaaaggagtcatacatacatcatgatagacgttcagcaaaggggaggatatgatgtttcaattgttcaagccggctccgcatattgagagattggatgattcaaagacggatgcggcctataaacggctcaggctgcaggtatttttggggattttcatcgggtatgccgggtattatttacttcgcaaaaactttgccttcgctattccttattttcaggaacaagggttttcaaaaggggaacttggcttggtgcttgcggccgtatcaatcgcttacggcttcagcaaatttattatggggatggtgtctgaccgctgcaacccgaggtatttccttgcgacaggtctgtttttgtcaggtgtcgtcaacattttatttgtttccatgccatgggtcacgtcaagcgtgacgattatgtttatttttatgtttattaacggatggtttcaagggatgggctggccgccttgcggacggacgatggctcattggttttccatcagtgaacgcggaacgaaaatgtcgatatggaatgtcgcccataacataggcggaggtattctcgccccgctcgtgactctcggcatcgccatgtttgttacttggaaaagcgtatttttctttccggcgattatcgccatcgtcatttcatttgtgattgttcttctcgttcgggacacgccgcaatcctgcgggcttccgccgattgaagaataccggaatgactatccgaaacatgcgttcaaagaccaggaaaaagagatgacgaccaaagaaattcttttcaaatacgtgctgaataataaatttctgtggtatatcgcatttgccaatgtctttgtttatttcgtgcggtacggtgtcgttgactgggcgccgacttatttgacggaagcgaaagggttctctcctgaagattccagatggtcttatttcctttatgaatatgcgggaattccgggaacgattttgtgcggctggatcagcgaccgatttttcaaaagccgccgcgcaccggccggcgtgctgttcatggccggcgtatttatcgctgtattggtctactggcttaaccctgccggtcatccgctcatcgataatatcgcgctgatcagcatcggattcttaatctatgggcctgtcatgctgatcggacttcaggccattgaccttgcgcctaaaaaagcggcgggaacggcagccggcttaaccgggtttttcggctacatcggaggctctgctttcgccaacgccatcatgggttatgtcgtagaccgctttgactggaacggcggctttatcatgcttatctcctcatgcgtgctgtccatcgtcttcttggctatgacgtggaatacaggcaagcgggcggagcatgtgtaagaaaacaacataaaagattaatatttttgcagtacagcatttacaacgattttctacactagagacagatattgatttttaagggggaagaaaacatgcggaaacataagttgtttgctttggtattgctttcattcggtttattgtcattcatcgtcacgcctgtatcggcggcgggaaaaggaaacctcttgtctcctgacagaattttaaccattgcccatcgcggtgcttcggggtatgtcccggagcacacgatcctttcttatgaaactgcgcaaaaaatgaaggctgactatattgagctggatttacaaatgacaaaagacggcaagctgatcgtcatgcatgatgaaaaactggaccgcaccacaaacggacaaggctgggtgaaggatcatacattagcagagattcaaaagctcgacgccggttcttggttcaataaggcctatccggaaaaagcaaaaccgcaatacgccggacttcgcgttcccacacttgatgacgtgttaaaacggttcggcagacatgcaaactattatattgaaacaaaggcgcccgaaacatatccgggtatggaagaaaaactgatcgcctcactgaaaaaatacaaattggcaggtaagcatgcgaaacttggacaagttatcattcagtctttcagcagggagagccttctgaaaatcaaacagctcgatccgaaacttcccgccgtccaattgcttgaagcggaacagatgacctcaatgactgacgcagatttaacagacatcaaaacatatgccgtcggaatcggaccggattacaaagcgctgaacgctcaaaatgtccgaaacattcgcagccacggcctactgcttcacccttacaccgtgaacagcgagacggacatgcgccgtctgctgaattggggcgtaaccggtgtgttcaccaactatgcggatatatttcaaaaggttaaaaaagaatataaatcataaagccagcatgggttcggagatgatgccgaacccatgtttttttgcctgatcaaaaaaccttgcgggaacgttaccgcaaggtttttatcaatcattattcttttccggcagcggcttccgcctgcccgccttttaattgatcgttgattgctttggcgtctttcaaatactcagtcttgaatccgctcttcagcgcccacgcatagaaggcaagggcaacgattgcgatcagccccatatcccatccgtacggaatgatgttcagaccgccgaatttttcacttccgagccatgaaatgaccatcatgctgagcagatagacaaccatccaaacgccgcctttaaagtttctgcggaatcctttccacttcgctttcgcttggtagtagaaataaatcggaaggccgatcaaaatgataaacagcacctgccctgttaacggccagcgcgcccaatacagcacgagagacgcgaacacgaagccgagcggtgcaaccacgctgagtcctttcagacggagaggcctgtacaaatccgccgccgtcctccgcagcgtcattaccgtcacgggacccgtgatataagaaatcagcgtcgctacggaaatgatttcagcaagcacgccccatcctctgaataaaaacagaaagataaacgatacgatcaggttgaaaatcatcgcttggcgcggcacgccgtacagcggatgaagctttccgaaaatgctcggcatatatttatttttttccatgccgtaaatcatgcgtgacgtcgtagcggtatatgtgatacccgttcccgacggagatacgaacgcatccgcataaagaataatgacaagccagttgatattcaatgcgatcgccaaatcggcaaatggagagttaaagttcaggtgactccagccgtgaacgatcatggaaggttcaaccgcaccgataaatgcgatttgcaataggacgtaaatgacggttgcgaccagcagcgaaccgacaaccgcaatcggaatcgatttgccgggattttttgcttctccggccatgttaatcgggctttgaaacccgttaaacgcaaatacgatacctgatgtggccaccgccgtcagcacgctcgcccagccgttcggcgcaatgcttgaaccggatgtgaagtttccgccgtgaaaaccggtaaacagcagcgctccgattgtcagccccggaataataattttaaagatggtaatcaatgaattcgcttttgaaaacaagttaactgtccaataattcagtaaaaagtaaataatcagcaatacggatgcgaagccgagcccctctcccgtaagtgtgccgttgtgaacgagattgcttgtccactttgcccagtcccacggccatgagctcatatattgaacagacgcaaccgcctccaccggaataacggaaacaatcgcaatccagtttgcccatcctgcgataaatccaataaatgatccatgagaatattgagtatattttaccattcccccggcttccgggaacattgaacccagttcactgtaagaaagtgcgataaacaaaattacgatcataccgataatccaggaaataattgcggcaggtcccgcaatctgagccgcccgccacgccccgaataaccaaccggagccaatcatcgacccaagtccgaccatcatgagtgcaaacgttcccattctgcgatgtaattgattcataaagttaacacctttcaattaaaatatgactccagcgctatcatatatttataatattattctgaaaatagttttgtcaatctttatcgcattaaagcggcaagccaaaattaaccttccgatgtttaaacagccgttaagcgggaataactactgcaagccataaatagaaaggagtttttatcgtgaaacaaaaactgctcatttcaggacttgccgtgtcgactgtcggagtgacttcctacctgctcaaagataaatcaaaccgccaaaaggtgatgaactttatccgcaatatgaaaacatcgctctccgggaagcaggatattgaatcattccccgtcaacaaagcaggcaacccgcatcccgaagatattgaagataacaaaatggtatccgaaggctccatgtacccggttcaatattatgatgacaagaagaaataatctgtgcccgggctgcccggccgtatcaaacggcggcagctttttttatgcagacggcgttttatagatccgccaatattggcgcgatcctttctcccgcacggtaatgcccagtttggatatttccgctttcagctctttcgcatcagccttttcctcctctttcagcgccttttctctcgcttttaaaagagcatttgccccgggctccaaatccggcgtgtccggcacccaccgtttgtattcttctttaaaaggatcttccgtccccagccagacatacccatgcgcgcgaaacgcatcagccgctttttcaaccgccggctcaagcttctcccgaaaaagctcctgtccttcagtgcctaataaaacaagatacttcccatccgtaaacacaccggaaatgctgtctttcgaaaacacgctttcttcattatatatggttaaggacaccccgctgtccgtcacgactgccacaagactttctttaaaagctgcccgcgtcagccacactcccccaattaagccgataacggcggttgcagccgcagccttccatccgtgaaaggaagcgattatttccagcggcccgtgaaaaggcagccaatccaatgttacggcccacttcgtaatgaccggcagaaaccatccgatgaccagccccaataatggcggcaccagataaaccaaagctttttcaaccgatgacaactcaagaaccgtctgtttttttatttcgttcatgtttctcctccgtctgtgtttttcacaactatccattatacaaagggttggatgattctgtaaactggttccgaaacaataaaaagcctcccggccgccgggaggctctttaaaatagaagctcatatacttcattcaattccatcgtgcgcttctcatcctgctcgttctcagcatatttgatttccttttcaagcacctgattcagcgcatccatttccagatcatttagatctttcacgaactcgccctcatttgcataatgcttcacctgaagctttttataaaccccccggcacacatcatgctccaagtggttcgaaagcgactcgcgcaaatatccgagtgtcctgtccatcatgtaagccctcccttttctttaggaatagcttcccggaaagagagaaaaactatacatgaaagcaccgggcggctgttttaactctgtacctgaatggagaaaaatccgctgcttaacggcgtgtacggcccgttcagccccgttgcggagaaagagaacgttcctgaactgacataagaaagaggaacgctgtaatatttaatatagcctgtaacgatattgccgtttttcgtatattcatcttccagcgcttttgacgtaagatttgtaatattcgttccgttgttaaacgcctggatcgtattattgttcggatacccttggaaatatacggctaaataacccgttgtccccttcatcggttttgatgcgctgatttggttcggaccgatattttcccattggtaattctgaccgtcagacgtcacaccgataatacggatttgtgttaaagcaggagccggcgccgcagacgctgacggaacccacaacccgctcacaagcaacaaagcagcggcggccgcggcaaatagcataacgagtctctttttcatgtttcttcctccttgtggttcaaatttataattatgttaaatattataagtttcattttatcagagaaatcaatagatagacagaatcaatcagtcaaattggtgaactttttatataaaaaagctatctcctaaaggagatagcttatataacattatttctttccacactccaaaattgtgtatttactcggagtctgaattacatttaatagtgttaatccggctttttcaatcaattgttcaaactcggttatctttctgactctgccgcctgcagagcatactaaaaataataaatcacgaaaagcttcttcaggggacagcctgtctgcttcaggcacattttcaactataatcagcttggaatgatcagacatggcaccggctatattttcaagaatagcaaccacatgctcatcatcccaatcgtttaacactttgcttatcacatacaagtctccgccggaaggaatttcctcaaacatactcccttccgtaaactgacagcgttcgctcatctctgaagatgctaaatgcttttttgcactttgtatcgtttttggaagatcaaacaatatcccctttgatttaggagccacacctaaaatgcctgttattaactggcccattcctcccgcgacgtctacgataacatcaaacttttcaaatgagtaagctttcaatatggatggcagactcatttttgaataaatctccatcgccttatccattgtttttaagtaatcttgatcaagactattattctcataccatttatcaccataaatggcttcaaaagcggatttgccggttttgatactataatccattttaaacatagactgcactactgtttcatgcagcagatattctaccaaaggctcaatggattttgctttcccaggcatcaaagtggcaccatactctgttacatcataatagccattttgagcttgggcgaccaaaccgacggattccagcgctcttaagagcctgaataaggcagaggggttcaattcaagggcttcagctatcgcttccgctgaagctggtccattttgaaaggcggaaaatacatccaattctaccgctgttttaactgccagggaaaaccccagccctgaaaccatttgcatgactgcggcctgaggatatttcttcggtacttgtttatcttgctgaactgaattggtcatttacgttaacctccgattaattaaatggtttctgctgcttttttgatataacgcatatactgattgagcagattttctacagtactcttatagtactgattttgattatattcaattccaatgctcaattttttctctcttaccaacacaataaacttaaacttgtaattccaaatttcatcttcacttatatcattcccggttgaaagcggagataccgtaaagctttctgtgtgcagttcattatcaaattcgcccatataattaaatgaaatgtctggttttgatttctcttttatatcttgttttaaatatcttaaaataccatatcctatcccttgatcaggaatattggctaaggtcgagttaacattatctaaactcgaaccgatatgatcagaatcggagacctccaaagccaccggatagattgcagaaaatctgcctactgttctgtagatattaagcttctcactctgatgagtgcggccatggttgcctaagtgcacgagagatgtattactgcctgtttgatgttttactgtcaaacctaaagctgtgagcaaaacagtctcaatagtgaaatgatcttgtccttgaatcgcattcattatattttcagtttcccgaacattaaactgcctgtacacttgtctgttatctttgactttggcaatttgcccctgaatatcaaccggaatagacggagcataaacattttcgattttcgtccaatactctttctcaaacaacagccgttcactttcagcatatttatagagataatcagaccattttaaatacgaatcggttttatttggtaatacaatgtcttcgttacttttaacttgctgatatgctgtattaaaatcttcaagcagtattctccaagacatatgatcaatgatcatttggtgaatgacgattaacagatgttccccatctgcttccttaatgagtgccaatttaacaagcgggccgtgagtcagatccatactggcttgtatttgatttattttcatttttaaaactgattgcggcatgtttattgcattgatcagatgaaagtcaaacaagtcgccgtccgtcaggcctctgattacctgtaccattctatcgcctttacgtttgaatactgttctcagactgtcatgatgctgaataatccgggtgaaaatgtcttttacaatatcttcgccaaacccggcttccctgtataacataaaagaaagattccgatggtgcagagtatcattatggctttcagccagccagcattgaattggcacaagacgggcttctcccgttatcacactgttatcagatgccgctgttatataactgactttattcgaaactccttcgattgtctggtaatgaaagatgtctttcacttccagcctaagattgaatttttccattctgaccgctgcttgtatggctttaattgaatctccgcctaaaacgaaaaagttatcttttatactgattttagaaacttcaagaatgtcggaccaaacctcactgacgattcgttcaatctcgtttctcggagcaataaagtgatgcagctcggcattattttcagctggaagcggcaaacgttttacatcagtcttcccattgttcgtcaacggaattttatctatgccaataatgactgtcgggatcatatattccggcagatattccaataagtattcttttagctgagaaggcggctgcgtatctttacatactgtataggcatatatctgatcattgtgagcaatcgcaaccgcttcttgaacattgcggtgagacagcagtctgtttataatctcatccagttcaattctaaatcctctgatttttacttgtcggtcgattcttccggcaaattctatattcccatcctcattccacttgcctaaatctccggttttatacattttctcaccagaatgaacaagatccgggataaatttagccttggttagttcttcacgattgcaatagcctcgtccaactccttcccctccgatgtataactctccgataactcccggcggcacaggcttctgctgtttatctagtatgtagatagaacagttttttatcggtgtgccgatagggattctctttatattggaaatattatcctggtttatcgtataagctgcagcatcaacacagcattccgtcggtccatatacatttgttatataaggacggtcattctttttaaatactttatagaaacgctttacttcttcaggtttaagcacttcgccgcctataataaaatgttttacacctatacggccacactgcggagactcagagagcaggctgagataggctggtgttccatcagaaatagttattttattttggatatagaattcagcaagtttcgtgatatcatgcctggcttcttcagagacgatgtaaagagagtgtcctaaaagcagtgcagaaaaaatctgtttgacagaagcgtcaaaagaaaagggtgccaacaacgctacattctgctgcccgccatgtttgcagtagatacgttcatgcagggcttctgttaaattcgctatacttttatgttcgatcatcacaccttttgggtgtcccgttgatccagaagtgtagatgatataggcaaggctatgcccttccgttcctcctttaacattcctcccgtcgtctggaactgtttccaattcattcagacaaacactttctactccgtacctttgaccatgattgttgcgatccgtcagtaacaaacgggccccgctgtctttgagcatatactcaactctttcttgcggatatgatggatcaattggcagataagctgctcctgcttttaaaattcccattattccgatgataaaatcagtggttcggtctgcagctatgcctactgcttcattctttttgacacctttttgaatgagtgctcttccaagccggtttgcatttttgttcagctcactataagttaagcttccgtcttgtgcagacacagctatttgattcggcgttgcttccgcctgcttctcaaaaagctcacagatagatgcatctgtgcctctgcttctcagtgatcttccactgtaactcaatatttcgcgtcgttcattttcttctaaaatgttaatctccccgattagtccatcttgactttcaacaatatgattgaggatcattaagaatcgctgtgagaatttttctacagttgtgcgcttaaacaagtttgatgaataagtgaactcaaacttgatatcctcttttgaaggaaatgcttgaagcagaagatcaaatttggctgttttgttttcataaagatacggcttatatttcagcccatttacttcaattgccggattatccatcagctgaaggacaaacataacgttgaaaagagcattctggtttatatccctctcaaggttcaaatggtctacaagctcttcaaaaggataatcttgattttcataagctagaagcgcattatccctaacggcttcaagcagttctttgaatgttttgtcggcagatggtttatttctcagtgccagcgtatttacaaacattcctatcatgttttctaattctttatgctttcttccggctacaggtgtgccgataataatatcttcttgaccagtaagtttatggagaagcacattaaatgaagccattaaagtcatgaaaagggtgactttttgttttgcgtttaattctgttaacttggcagtcagctctcttcctgcataaaaatagattcgttcaccttgatcatctcgttcggcttctcttgaaaaatctgcgggcagattgagaacgggaatttctcctttaaactcatttaaccaaaaatctttttgttttttcatttcttcagtatgaaataattcattttgccatatcgcaaaatccttaaattgaatgttcaatgacggcagttcgttgccttcgtataaatttatcaattccctttggaagatcgggatagacgccccatccgctataatatgctgtaaatctatcattaaaagatgtttttgatgactaatctcggctaatcctgcacgcagtaaaggagccttttctacatcaaacgggcggacaaaattagacataaggctctctaattcttcttcggaggtcttgattctatccattttaaatcggacgtctttttctatgatttgcacaagctgcccgtcccttaaacctatggacgttcttaaaacctcatgcctgattattaattttttaaacgcatcttctaaacgtttatcgtccaactctccttcaatcattaaaaagaacgggatattataagaagtgctgtttttatttaattgatctagaataaaaattcttttctgtgcagatgaggcctcataccactctaaatcgcctgctttgggaatcacattcacatcatttgtcttcctcagagaatattcatccaaataagctgagaagagttttatattcgaatgctttagcaagtctgaaactgaaagctccgttccttgctgtttattgataaagttgatgatttctattgctatgattgaatctccgcccatttcataaaaatcggatgtaacatcgatcggattgattccaagggcatttccccaaatttgtcctgccattagctctgtttctgaataacagccgtcttccctgccactcagtcttattatttgaggcttgttgactgaagggttatctggtgcattgcttatcggtaatttttcaggcagtttcacccaatgtctctcccgcaaaaatgcgtaacccggcaagctgatttttcttcttttttctccttcatataacatttcccaatcgatctctgcacctttttcatagagcttgcttatatcaatcagaagactctcatctgttctcccgcctgcattataagccttaagtttttttccagcagcggtacttagatctctatcggtcttataagaaaatgcagcttcttcttgctgaaccggcgcttcgagcagactttcaagtttttccttcagatcttcgatgtcttttacgagaaaacacactctattctccagatgttttcttcccgtattcgctgtataacaaagatcagagagattcaaattgttttcttccgagataaaatgaagatactttgatgctatatcattcaggacggacttattttttgcagacagagtgaatacctcttttacctgtctctgttcagtctcacctattatttcaggtgcttcttccaatacaatatgacagttggttccgctgaagccaaacgaacttacaccggctcttcttggcgtctctcctttttcccaatttcttatcatgtcattcacataaacaggtgaattcgaaaaattaattaaaggattcggttcattaaagttgatacttggggggatgaccttctcttttaaagccatgcatgctttaatgagagacgccatgcctgatgccccgactgtatggccgatattgggtttgactgaacctataccgcaaaactgctttttatcggtatatttcttaaacgcattcgttatccctttgatctcaatggggtctcccaaaatcgtgcctgttccatgtgtttcaatataagaaatagtttccggactaatattcgcattcttccaggcacgtgaaatcaatttctcttgtgattcagcattaggagcagtgattccgttagaagccccgtcattattcgtagcgctccctttaatgacagcatatatgtggtctctgtcttctatagccctatgtaaaggttttaatacaatagcagaaatcccctcaccccatgcggtcccctttgcatttttatcaaaaatgctgattttagcgttttccgcttctatttcgctcatcgtacctatattttcaggtctcagaaataaattaacgcctcccgcaatagccatgctgcattcttcatttttaagtgcctcacaagcaagatgaaccgaaacgagtccggaagagcaggctgtatcaacaaccaagcttggccctttcagattaaaaatgtaggaggtcctgcttgccaatatgccgggataagtacctgtcattgcaatcatatccgcatcctttactagggaagcataggaaaacttcaagtcaccgctatgatcatgtccaacgaaaatacctgtattcgaaccttgtaacttgttccccgcataaccggagtcctcaatagcgtgataaactgtctccaaaaacaatctttgtttcggatccataagcatggcttctcttggcgaaattctgaaaaatgatgaatcaaacttatcaatttcatctaagaatcccgctctaaaataagaattctcattcgcactgggcagcaatggatcaatatctttccgccgcttctccggtaagtcccggatgcatgaggcacggttcataatgttttgccagtattcttttgcattattggcttttgagaaacggcaggatatgccgataatggcaatatcaaattgatttttcttggacttatcagataatccttttaaaatgcgcaaagccatttccctgtccattttttgctcttttacttgctccaatacatattgttttataatcgaaatatcatccacgattaatcacccctatcgattttgattctatataaaatatgagaagcatcatggatatatagaatagctgcttcaattgaagcagcttattgaattagttaatttttgtctcaaaaacctttccatcttctttacataacacctgcaccagatttctggcctgtaagacaacactcggaagacctcctcccacttgactccaatgcccaaccatataaaagtctttaagtccgggaagtgaacgtttcagttttttctcgtgcatgatgccttccatctgtttttcccagccctgccagcttccatttctattatttgtgtatcttctgatcgtatatggggtggatacatcagtcacgtcaatatttgatttaatttcaccaaaccatttgtctaattcatcaatcattacattcgcaattgcttttttctcttcttcatatttttcgcggttgtttttttgcaaagtctcccagtattcagcagaagttttcgcatacacgataatactcgttttgccatcaggcgcgaatgaaggattttcgttatatattttcacaaatatgtttttaacgttgtcacagccataggcgttaagaggctgttctaattccagactcaaataatgaggatatttttcaaacgtttttgatacgcccaatccgacataaatttgcggtgcacttgttttaaggttgtcataacaaaatgtcagttcatcatctgtatattttccatccagcatttcaaaaatagttttatagccatccgctgctgaaatgacgatatctccataatgacactgtccgtttttcagctctattccgatcgctttatcattttctactaaaaccttagaaacaggtgatttatattgaatctcaccgcctaattcaacatatctggcttcaataatttttgcgaattgcagagaaccttctacaggatgtcctgaagatttgctattagcccagcctaaagtagccataaagtaagatataggggtatctacattaaaccaaaacagacgatttacattttctcttacaaaactgcttttaaagcgctgggcgaattctttgatcgtcacttttccccattgccccattactttcatgtaagggccagcctttgctttgaaggcctcaaagtctgctaaatcgaacagttcgggcgctttatccaaatccagctctacatcagaaacaactcgaatgccatcagttaaaagcttaattgtttccgcatcttcaggtgcaactcttaaaaactcctgttctaatttatctacatcagcatacagcgtaaatgtatcaccatttctaaagttaacaaccgcaaattcttcatcattaatgaattccatattttgtattacattcagttctttccaaaatttatggaaggtattgttaggtcctgaaccgaccagccagctgatacaaccgtcaaaaaagtacccttttctcttccagccggtacataaaccacccggcagcaagcccatttcaaaaattttcgtgctgtatccgttcatttgcaagtaacagcccgcggccattcctgcaataccgcctccgattatgattgcagtcttgttttcttctgtattcttcattaattttccccttttccgaaactagttttctagaattttcaatccttcttgtatattgattttgccgttctccaggtcgtcaaatagattgttgagttcttgctcaagccgattttcagcagtatcttcttccgtttcttgctgatgatctttattcagctgcttgtcaatatactctgatagctccactacagaggaatatgtaaatatatcggatatatccacaatgtcaggatattgttgatttatcagttttaacagttgggttgccataatagaatcgccgcccatggcactaaagctttcatataaatccagctcttgcatatccaaaaccatagagtacatttgcgcaatacttttttcggtatcagagtaaagttctccctttcctttcagcactatatcttcagtatctgttcttcgacgtttttctgcttcgttttttgtcctgtttttatctattaatttgtttttgatttgctcagataattcaaaagacaattcatccttcgcaaaagcgaggagcttcatatttaatgtacctggaatgatattagtaagcttattcgatgctatttcttctaaaacggaaatagccctttctaccgtcaataatctgaaaatagagctctcatcagtaattccataatcgacagctatgccgacctcatcccaagccggccagttaattgacagcgtgtttttcccctgtttgttttgcatataagcaaaggaatctaaataagcatttgcagctgtataatctccctgtccggcacctccgaaaatagaattaattgaggagaacaaaatcgtgaaatctaaatctacgtctctcgttaaatgattgataacccatgttccattaattttaggagcgagcacttctttaaaaatattagcttcttttctaaagaggaaaccgtccccggcaactccggcacaatggaaaacgccattgatcgtaccgtatttctgttttatttcttcaattaccggctccatgctgtttaagtcagaaacttcacagctgtagcaatcaactttagaacccattgactcgatagctctgatggacttcagttttctgcaaagctttaaatccgttccatcagcaatgatatcgtcccatcggctttgatcaggcagtttagagcgattgagcaatacagcattgacgttatgttttccagccaggtgctttgcgatctccaaaccgattccgccggtgccgccggtaatcatatagacaccgttttctttaatctccataccgccgtgtttcttatcctttatcggttcaaccgtatccaaccgactgatataccgcttaccatccctaaaggcgacttgatagtgtttcccttttgttcttaactcctcactaataatttccggtgaagtatgttcatcaatatcaattgctttacatgaaacattttggaactcctgcgaaataacacgtcccagaccaaacaacgcggcgcccaatggattgattgtattttcttctccggacacttctgtcacaagatcagaaataagatgcaaattaatattgcttttcatcttattcttacttaatccccggactaagcggaacaggctgtatacgcctttattctgcatgtcttctaaatctgttaatgattccgttccttggcggctgatagaagacatatgtataatgctgctgatattttgatcgtttatgctatgcaataattgaacatagtcttcttctgatccgctaattaggaatttccgcccatttatcttctgaaattcatccccaaactccacttcaataacatcatcgtcatgaattttcaactgttccagtatagatttataaatttccatgttgtctttaaataacagtataggacctgttacctctgttttttcttcttcaaaagcttcttgcgccatccattttaattgataaagtgattcagaactttcttcaaaaagggcattaatccgatttactttttttaatacataatcggtgatttctgcaaaaacatttccttctgtatctattaactgaatatcacacagctttgtctctttactgcttgcgttctttttgacaaatgcataaaaatgctgcggcattcttgagtaaatcttcacgcttttatatgaaaaaggaaggaatgtactatcgtcatcatcttctccaataaacacgttcactgcattatctagcaaagcgggatgtaaaaagacgtcttttaaatctgctgtaaattcatcagccaattttaattcggccaattgttcatcagggcccagtatgacttctttgaagttcagccacctcggtccgaaagtaaagactttgctgattaaaccatttttattttcataattgacttttatcttctctctattactgtcattcctaacagagtctaaatcaaacattgatacagagtctgttaatggaaacgcttttccttctgcatgtgtaatccaggtttctccttcctgactggctattataaattgaatacattctttctttttcttaatgattgtgtgtacaatcttattctcatcctcatttactgttaacggagtgaagaagataatatctcgtaattctaattgattgcttttatagtaagcggcacttgctcttcttcccatttcgatataagtcgttcccggaataacgcaagcccccatgattttatggtcacttaaaacccaatccttattcacattaaatgtcgttgaatagatcgtctcattcattgaatcagccaaacactggtcaatcagcgggtgactgatatttttctgatgcggcgcttgacctcttctgtcttttacttctccccagcataatgttctttcaaattggtatgtcggaagactgacaatctttctgcgctcatccttgtacatttttgtccattctacttttgctcctctgacatacaggttgcaaatttccgtaaggtttagcagtaaatattcatccccttcagtaagaatgtcatgtatcaaattgtcagattgagcattcattttgcgatgttcagataaggaaatttctccttcatccataatctgttttctatcagaaccaactttatggaaagaaaaatatacgcctttttctgatatttcattcaggttatgccctgcaagcctgccgatttttctctttaattcttcgtaactttttacaatcagagccaatcggtagccgtaatggccccgccctgtgtttgctgtatagcaaatatgttttacgtttttttgagttccttttttaaagaattcattatattccttgatgagtttcattaaagaattctctgttttagctgataaagtaaatatctcaaatgtttcatttgcaggaatgacctcttcaacctcatctccagcatcttcaatcactacatgtgaattggtccccacaaagccgaaagaactgattcccgctctcctcggtgagttatttttaggccattcatgggctttgtctgtaacaaatacaggtgacttcacaaagttaatcaatgaattcggttctttaaaattaatactcggagggatgacttgatgcttcatagacagaacgatcttgataagtgacgccaaacccgaaacggcaacggtatggccaatattagatttaacagatccgatcccgcaaaactgcagcttgtccgtatattttgaaaacgcattggaaatcccctttatttcaattggatctccaagctttgtgcctgtaccgtgcgcttcgatatattgaatggtttcgggatcaatttgagcattttcccatgcctgaaccagtacttcttcctgggcgatggcatttggagctgtcaatccatttgaggccccgtcattattaactgcactccctttgataacagcataaatatgatctccgtcctgcttggctttacttaaaggttttaagatgactgcagctactccgtcactgaaaaatgtcccgtctgcgtctttatcaaatgagtgtactttatcacttactgattccatcattgattttttggacgttttgaagcgcggaaagaatcctaatgaaattccgctgacaatagacatatcgcattctttatttttcaaagcattacaggcaagatgcacaccaagcagccccgagctgcaagcagaatccaaaaccatagaacttccttttaaatttaataaataattaatccgccccgccatcaaacccggccagttgcccgtcatacttgtcgattctgattctgtaatgtagcggtacaacgtattattgacatggtcttttccaacaaagagcgatgtgttgcttccataaattttgtcccctgcataccctgcatcttcaatcgcagtccataccgtctccagcaatactctgtgagacgggtcaatggcctttgcttctttaggagaaatattaaaaaattcaggatcgaacttgtctacgtcttctaaatatccgccaggtttccagttatctgcttgttcttccgtcagatatcctgaaccgagaaaatcagtaaaccctttattgtttacgatcggtttaatgtaattgatcatatcttttggatattccgctttgcagtcttctccattcatcagattctgccagtattcatctgtattgtttgctttcggcagtctgcaggaaattccaatgatagcaatatcttcattgctgcttgcagcctttaattcttttagcattcgctttgcttctttctggcttagcttatgctgtttcacttgttcaaatatataagattgaacgctattcattacggatcactcccgctttctttctaagaaaatttttgataggaagggtaataagatctacatttttaccttaaaatggaattcagttcccgtaataatgtgataggataggcaggctgctttttcttcattcaattcgcagcctgccaatatccattttgcgaatatattcttacaggcccaattcagttattttcggtctggatgaaatatttgatttgcttcgctgacttccatctctccggatgccagcttattcaaaattgcatccaggtcatcttcattgtcttcttcagggattcggtcagaagacttctgatcactgaagtgggattcaaggtaggttgacatctccttaatggagggatacgtaaaaatatcagaaacatcaatgagagaaggccattctttctctatttcttttaccagatatatcgcggatattgaatctccgcccaaatcataaaatttatcagttatactgatttgttctaagcctaaaacttttatccaagctttcattagtttattttcaatatcgctgaagctaaatgtctgatcggttttcgactcaacagatttttttacaatcgcctgctccttaaaagtcaaaatatccggagataatcggaaatgaatttgatcttgatttaattccagtacccgatgatcaatttccccgatgatcacattccggatgtccttttgcatgacttcatcgaaggcacgtatcgcttcagctgaggtaatcgtcttaaagccgttttcatctttatgttcgtttccggccttttgacgctcttcaatatattcggcaagcatgcccacatccgaccagccgcaccaattaatcgtaactgttttttcatccggtcttcttcgctgtctgcgttctgcaaaggaatccaggtaggcattagccgcagtataatcagcctgccccatactccccgcaagtgctgtgatagaagaaaacattatgaagaaatccagatgctcatgctttgtcagctcgtttaatatccatgttccattaactttcggtctgagcacgttatcaaacacttttttttcctttctgaaaataaacccatctccagaaacaccagcactatgtatgacaccgtggattgtattgtatttactctttatttcctcgaatacatgaatcatttcactttcatttgcgacatccgccttatagtaatctaccttagaaccgctttcttttatttcttttagagcatcgattttcttgttgtttcccttctccatgttgatctgctgctcggagcgtccaatgaggattaattggacattttcttttgatgataaatacttggccatttctaatcccagtccgcccataccgccggtaataacatatacaccgttctttctgatgcttattttcccttcccgaattacggataagtcttcagtctggagctcttgaacgtatttatgccggtctctgtaagcgacaagctctgactgtttttttgagttgatttcaaacaagatgctttccgccataagattttgatccaaatctatgcatctgacacttacacgcgaatattccttttcaattacttttccaaaaccgaaaaatgccgcgttatgcgggttaatgtctggttcttcaccgcttacttgatgtgcaaggtctgcaaacagcatcagttctatgttattttttgtattttctacaagtgattttgttaaataaaataaactgtctacccctgaggatatttttttctgaagctgatatatgtttttgtctttctcattgctgatagacatcaaatggacaatctgagaaaccttttcactttgaagagcttttacaagacagtcataatcttcttgagaatcactgacagtataatgatggcttccgattttagagaaatagtcaccctgttccgcgacaatcacagttttcccttccagttctaaccttcgaatgatttcctcggataaactgcagccattattcttaaataataaaataggatgatgaatttctcgcatctcgtgtgattgatcgctttctcttatccaagatagcttatgatatatattgtttcttttagtcttttcagctgctttatgcaccctttttacgatgtaattgttgatttcaccgaaaacttctccagtgtcattcagcaggacgatgcgaaacgttcctgtttccccgttgcttcggctctttttcttgatataactgtaaaactttttagaagcagagccataaatcttaaattctttataaaaataagggagataggtttcgttatctattgtgaatgtcccggcattaacggcacaatccatcatcgcaggatgaagcgaaaactgaacgaaatcactctcatattctttcggcaattccaattcacatagaagcctgtcgtcgtctctgtagattgcgttggtgcatttccatctgcctccgacttgaacgatgctttccggtctattggtatcttctatatgataaaccgacttgtattcatcggtgtttatttccgtcaatggatgattattacgttgaatgacataaacagaattaaagcttttctttaaatcctcaatgtcatatgtttcccgtaccggttcttctttcgcaatgaccgcttccgcgtgttttatccatttatcgccggtcttacttatcacactaaactctaaaacgctgtcctttttctttatgatcgtatgaacttctttaacttcatttgcttttacctttaactgatttgaaaacgtaacgtcttttaacagaatgccgacaggttcgccgaagtattttcttcccgcttctctagctgtttctatataaaccgttccagggataacgtaagaatcattcactttatgttcatttaaaaaccaataatcagtgacattcaaatgggatatatacacttccagattcagtgactgcactgcaagattgctcaataaagattgttttttctcatcggctgaagggccgtctgcagccagctcagcccataatctttttccgctgaatttgtatgtcggcaagctgaccttttgaaaattcatctcgctataaagatcttcaaagttaatattcgccccatcacaatacatttcacataaaatatgtaagtcagaggttggaatattagagacgtcttgtctgactctttgaatcacattttttattgtttgagtattctgcacactgtctgtatgcgtttttcctataaactttgtttgatttgttatcgattgaaagtatatatttttctcccgatacgttttccattcagagcatgataaaaactccagcttttccagcagttccgcgacagagcttattaccatagcgagtctgtatttgtttggcaatctcccagtgtttgctgtataacatatatctcccagattcacatctgtttctctctttaaataatcaatatgatctgtaagcaagtgcgcgagagatgttttagtcctagctgatacagtaaaaatatgttcagataaaacggattgatcgactttttcaactgcgggtgcctcttctaaaatgacatgacagtttgtaccgctcagcccaaaactgctgatgccgcacctgtatactccgctgctctcccatgctgaaacggagtcattgacgtaaacaggcgattcatgaaaattgatatttcggttcggcactttaaaatgtaaacttggcggaatttttttatgctttaatgccattaccgctttaattaaacccgctattcccgccaaactatcaagatgcccgatgtttgttttgactgaagatactgcacagaactgttttcggtctgtatattttctgaaagcccgttgtaacgcatttatttcaatcggatcccctaatttggtccctgtcccatgagcttcaatatatgtaattgttttaggatctatttttgcatttttccacgcatctactattacttgttcttgagctgctgcgttaggagcggtaattcctactgagctgccgtcctgattaacagcgctccccttaatgactgcatagatctggtcatgatcacgaatcgcttgggccagcggcttcagcaatacggcagcgactccttcgccgctattcgtgccgtcagcagaatcatcgaaagtccttacagcaaaatcagatgaagaattcccgatatttaacctgctctcctctattgtctttgggaatacttttatattcactccgccggctaatgccatatcgcaatccttatttcttattgcctgacaagccgtatggagggcgacaagcgatgaagagcatgcagtatcgattaccattgctggccctttaaaatccaagatatatgacagtctgcttgcgataactgatttaatgttacccgcggtagccagtccgagtaatgattgatctcctttttcaagcaatctgaagtattcatttgagccgtcactgctgagtccaatgtatactcccgtatttgtcccacataattttccgccgccgtaacccccgtcttccaatgcgttccaggccgtttcaataaataatctttgtctgggatcaatcaactttgcttcatttggaaggatactgaaaaagtcacaatcaaatttatcaatctcatccatataggctatttttgtataggctgcatctttactgtacttggttccgctgttttttaatgactggtcagcatctttttttctgttcagaggaatgtctctgatgaactcttttccttgtaaaagtaaatcccaatattcatttacgtgattggcttcgccgattctgcatgataaaccgacaatggcaatgtcatctccggaaatgtctttggtcccttcctcgtttttttgtttctttacattaggagtttgatttgtaaaagcggccgcttttaagttacttaaacttataaagtctgttttcatttttttacctcgctgagaatcactagataggtgatcatacctgtcaaacttcaaagtcttcaaagtgtttttttgtgtttgtttcagaaaataattgattaaatctttttttctgttcatttataggggttttttttgttcgaaacactgacttcagcatttctactgccatatgcatttgttctcttgacggctgacgacctgatgtttcaagttcagcctgtatggcagctactttttcatatggttcgattacacctttggcgtattcctcattgttccagttgtaatttttagtagcaaccgcgatccctaaacttctcgagataatagaaaaaccggcttgcagtgaaacagattcgttcaaaagagtctcttttataatcttcacgtcctcttctttgtcgtagctgtacgatttgatgtcagcgatattgtttcttacaagattccttaatacagatttcggcccaaattcaatcacagtatcagtatgatttgcttctaaatacttcatgattcccatccaatttaccggttttacgatttgagttcccagtatgtcagccatttgctgtttatctgaatatggaagagccgtcacattagataaaactttgtattttggagttctgagatcatacttttttaactcatggctgaatttttccgcagcaaaacccatgatcggagaatgaaaagcagcacttacatttaatttaaaaatgtctgctcctctggctttaagagtttcactaagctcttcaactgctgccgcttctccggataccacaacatctttatatccattgtagttagaaacagcaatcgtttttcctcttgaagagagagattcgcactcttcttctgctattctttcatccaggttcctgataacagccattgctccggtcccttgttcggcagcttctttcattaataatcctctggctctcaccagctttacagcgtcctggaaatccaaaacgtcactgcaaaccaaggcagaatattctcctaaactatggccggcgatatattcaggttcttttccgacctcttccatgtagattctgaattgtgcaatacttgttgccaggatggccggctgagtattttctgtttgagatagctcagcggcacttccatctatacataatttcttcaggtcaaatcccaatgcatcactggcttcgtcatacgtttttttagcgataataaaattgtcacataaacgtttgcccattcctgcatattgagatccttgtcctgaaaataaaaaacctattttcgacatttaaatacctccaaagtccctataatgcctgatttgccttacattctgccgatcagcaaaatgtaaggcagaaccggccgctttatattgaattgtctgctttgtctgctgtaatcacttgaatcaaattcatgtagttataaaataaatctttcattttgtgctcatttagtttctgatggttatatataaaaacgatttctgcttcggatggcttttcatgaactgcaaaaaccagatcatataattctgagtactctttttttgattcattactaatataaaaaagaggaaaaacatcttgggccgaacttgatttcttatagtgagtattcaaatcgtattgtgaatcctcttgattctcaatctgctccttcgccatacgaataatatcgtgaaaattctcgatatcagacagatcaaaagacagctgactcatccgatcatctccatgacccgaaaattggatatgaaccaagttttgctggctgacatcagctaataaaaatacataacccgctaataaaacatgagaaatatcatatttgtaggtattgcatattgtttttaaaccatcataataattcgcatttaccgcatattcgtgcatggctgtatgactttgtccagttgattccgagatgtattcaagcggtaaagtaataggaatgatttctttttccaaggacactgctatctccgcaaaggctatagctgattctatatattcggacaatctgtaaatagtcggatatgcaaacaagtcagcaatttgaatttgttttggatacagcttctgaagctcattataaactgcaacgattttgattgaattaccgcctgcttcaaagaagttatcatgtattccaggctcttctatttttaaaacatcggtccaaacacggctgatacttttttgtacatccgttaccgcttcctcaaaaggccggtcaaaacctgttctatctataacaggttcaggcagtgccaggacatttatttttccgtttgctgtcagcggaatttggtcaattttcataaagatctgcggaatcatatactcaggaagcacaggtgataataacttaataaattctgaaggatatacagtgctttctgccacataatacagaactaaatcttggactcctgcggaatttgtttttccggcagctacacattccttaactttttcatgttggtttactatgctttcaatctctcccaattctatccgataccctctgatctttacctgattgtccattcttccgataacgtccagttcaccatttggcagccaccttgctaaatctcctgtcttatacatcttggttcctttaacaaacggattgtctacaaacttttgcgcagtcaaatcttcttttcctaaatatcctctggccattccggctccagcaatgcataattcgccagtactgccgagcggtacagtgtttccatcatgatctactatatatatctgtgtattcgcaatcggcttgcctatatttacactattttcattggttaagtctttcacagaagaccaaatcgtcgtctcagtcggaccgtacatattatagatcttcagatttttatatttttttagctcaaataacaattcccgttgaaatacctcgcccccaaccatgatggtcttcaatttctgaagactctccgtactgttttctgcacttagcatcagctttaatctggatggcgtaagctgaatagtattgacatcagtctcaacaacgatcttgtttaacaagtacggatctctttgttccgcttcaccggctatgacaactttcagcccttgagttaaaggcagcagcgactctaatccgaatatgtcaaatgagcacgtggtgaccgaaagaaggacattgtcttgtgaaaagctgatcctgtctgttattcccttaataaagttatgaacggcacggtgctctacggcgacccctttcggttttccggttgatcccgacgtataaatgacatatgctaaatcttcggccctgttaataacatcaatgttcgtctccaactgatgtaataaatcctctgaatctatgttaaatatggttccgctgtacgttaattcatttggaagtccttcttcagttaacagcaggccgcttttactgtctttcagcatataattgatcctgtctgccggataatcaggatcaagcggtaagtagcatccccctgcctttagtattcctaatattcctataatcaatcggaaagaccttcttaccaaaataggaaccacaacattctctttgatgccgttttccctgagggctcttgccaattgatttgccttattattcagctccttataggtcaagaagtctccgttccattccagagcgattgcatcaggtgtccttaaagcttgctcttcgaagagctcttgtaacgtcttttctttcttatatgataattccgtgcagttgaattctttcaccagcttttgtttctctgtctcatttaccatatcgatctgagaaactattacttcatgatcagccgctgcctgctgtaagatgctaaccaggttatctaagattgaacttaccgtttctttactgtaaacactggcgttatatgtgattttcatatgcaagtcgtcaccgggagcaattaaaagctctaaatcatagttggtttgttcaaacccatgttcagcagttatttttacactcgaacgggctgaatcttggaaaagatcctcactcaacgggtaattttcatacacgactacgtgattgattaatttattcttcatacttgtcaaagactgtatgtctgccagagaacaataactgtattcgttcgcttcaataaagtctttatttatttgtttagccaatgaaataaatgatgtatcacattctcttttcactctgattggcactgcatttataaataagccgaccatattttcaattccgtttatctcactcggtctgcctgaaacaatggaaccaaataccacatcatttgtattgttatatttctgaagcaatatcccccatgctgtttgaacgatagaatttaatgtaatgctgtttgactcagcgatttttttcagcttagcggcggtttcaccgttaagcgctcccagtttttgatcatgctgatactcgtcagatttcaattccagttccggaaatgagatctcttgttcatatgcagaaagatattccttccaatattcaaatgcacggtccttgtcctgctgatcaagccattcaagataacgactgtacggtacaggtgattcttgaaggagttttttcccttcagccacgtcaccatatagatccataagctcttttaacaggataccgacactccagccatccaaaataatgtggtggaaactgtatatgactttaaatttatttcttcccagcttgatcaccgatactctgatcagacaatctttgttcagatcaaacggagtattcctgtctctcaccttgaattgccctacaaaggcatccttcttctgctcctcccattggctgatatcatgatattgaatgtttagttttctttcttttaaaatggcttgtttaaatacacggaaaccgttatagaaaaatgacgttcttaatatttcatatttagcaatcagcctgtttaatgcgtcactgagaacttctgtattcagatttccttcaactgttatttcactttgttcgaaataagcgctagattgatggtcaatcacagcgttatacagcatgccttcctgcatcggtgaaagagaatgaattttttctacttcagcaccgcttgcaagaatttgatttagctcctctatttgaagatcgggatccccataatcccatggagttttctcagatattttcttattcacacaatgttctatgatctgatttattttcaattgataggctttcgtaaattgctcaatcgtctctcgtttatattggtttgcactgtaattgaacgtaaacatcagcctgccatccatgatatatccatttatttctatactatgtgtctttttatttcttccagatatgctcgttccggcggacaaaggtgatatttgaaataggttgctgcgatcttcttggccaaattcacccaagtagttaaaactgatatcaggttttaattgaagatgaaccgagtccgacaaatatctgagtattccgtaaccaatcccgttatgggggatatgtctaagcatttcctttgtatacttaatggagcttgataaactattactttccgtcatatcgagaacaattgggtatattgtcgtaaaccaacctattgtgcgatggaccggggtttttataacactttcacggccgtgcccttcaagattcacaaggatcttctcgttgccggtccattctttggctgcaagtcccagtgagcaaagcaatatatcattaatttgtgtatgatatgctgcatttgtatttcttaaaagtgtttttgtttgatcctctgttaattcaattttaatttctttactatcttcataagagcagctttcggcaatgaaatcctttggaagaggttcaataatagccgtttctatggtctcccagtacccagcttccttttgaagagccttgctgtttgcatattctttcaattgacgcgcccattctttgaacgatgctgttttagtttccagctccaccttgttcccattaactgtttgaagataagctgtttcaaaatcttccaataggattctccaagatactccgtcaatgatcatatgatgaatggttaatagaagatgatctccgtttttggttttaaataccgccagttttattaaaatccccttttccaagctcaattcgttctgcatacggtcagccagtgattcaattgccatggctggatcttctgtttgtgtcatatcaaatacttctaaagtaaatgtttcttttgcctgtttaatgcccctattccattgcttaatttcaccgttttcctttttaaactgcatcctgagggcatcatgatgcctcaccagttccaaaaaggccgtttcgattgctttttcttctatgccggactttttgtaaagcataaaggcttggttatagtggttttcttgttcaaatctctgttctataaaccatttttgaatcggtgtcagatcaacgtctccttctacaatcgactgatctgcttgtatatcagctgattttacgtgagcactcaagtcttttatgtgcggatatttcattaaatctctgacttccagttttaagccgtatttttggagttcggaaactactaaaattgatttaattgagtctccgccgatctcgtaatagttatagttaatcccgattgatttcatccccagaactttctcccatacgcatgcgagaatttgttcctttttatttcgcggtgcttcatatgcagactccaatacatccgcaatatctataatcggcaatgatttcgtatctatttttccgtttgaacttaacggcattttttcaatctggaagatataacttggcaccatatataacggtaattctttagacagattttcttttaaagcataaacatctatttttttgtcggaagtaacataaccgcagagatatttatccccatgttggtcatctctcgctacaacaacagcctctcttatgtgactcattttcagaagccggttttctatttctcccgtttcaatacgatatcctctgattttgacttgatcatcaattcttcctaaataatcaattgtcccgtccggcatccattttgccatatcccctgttctgtataacttagccccgggttcaaaggggttatctacaaatttttctgacgttaagcccgctttatttttatatccgtctgcaagtccttctccgctgacacaaagttccccggctgcccctaaaggaagtaattccaattgttttcctaatatataaagcttagtattatccgcaggtttgcctattgatactgcattgccattgtctctttcaatatgatattgatgaatcatacacccgactgtagcctctgtcgggccgtattcattgtagattttgacatgaccgttaaatgcaccgtgtatcttttttgcaagcccggttttcagctcttccccgccgacgattattttttttatctttgacgtacttaaatctacattctccagcaatctcaaatgcgtcggcgttagcttaataatatccgctttattttcttctataattcttctgatcagaagagccttgtccggtccctcataaataataattttatttcctgaaataagcggtgtataaattgaagtaaccgttaagtcaaaagaaatagaagaatacagaggaaaatcaatatcttcatcatttacatatatcttatttgcccaatgaatataatttaccacgcctttatgttttaccatgacgcccttcggcagccctgtagtccctgaagtataaatcatgtaggcaaggtcttccgggcaactgacattcggcagattacttctgttatgcatatatagagtaggatcacttaatgataaaatttctttattgaatgtaataccacctgacaatccgttttgaattaggagaatgtttgcatcactgtctttcagcatgtaatttactctttcatcaggatattcaggatctatcggcaaatacgctccccctgctttcagcaccccgataattccgatgatcatctcaagagatctctctgtcatgattccgacaatgctgttttctctaattcctttttgtctcaaaagattagccaggctgtttgatttctcgtttagttctttataggttaatagcgtatcttcttggacagccgcaatacgttcaggtgttttttctgcctgctcttcaaataattgatgaatcgttttattccgaggaaattcagctgccgtgtcattgaatatatggagcaatgtgtgcttctcctgttcaggaatcaaatccagtttcattaaaggttgatctaggccggcagctgcactttgtaaaagcttcgtaaaatgggcacccattctctcggctgtttctttttcaaataattgactggagtattccaagtggaacttaattcctttatcaatttccgtcgcggttaacgttaaatcgaattttgaaatattgatctcggtttgaatatgctcttccggatttggatccaagtgattttcaataccgtaatctgcattttcaagtacaaacatgacatcaaacagcgggttccggctcgaatctctttttaccccgagtttttgaacaatattttcaaattggtaatctgtattctcaaaatcttttaacgtatgatgtttgacctcttctaaaaacgctctgaatgttttatgttcctcaggaaaatttcttatggcgacggtattgacgaacatccccaccgtattctccagttcggtgtctgaccttccggactctgccgttccgatgatcacatcctgctgaccgctgtattttgaaagcatgatattatataccgccagcagcaccatgtacaaagttgttcctgtttctttcgccaccgactttaagcttgatgttaacctttcatcggccgtaaagctgactcggcttccttcaaagcttttgactctcggccgctcgtaatcagtctgcagattgagaatcggcagatctccgcttaaccgcttaagccaatactcctcttgttcctttaacgcctcttttgttcctgagcttacttgccattctgaataatctttatattgcagcggcggctgttttagtttatgacccgcatacagcgcattgaattctttgcggattattccaaccgatacaccgtccgcagcgatatgatgaacatctaacagcagcagattccggtcttcatacgttatgagtccggctctgattaacggtgctttgtccaaatgaaagggtctgataaactgcttcacatatggtcgtatcccatcagacggcagcttctgataattaaattcgagctcccatgtatcgtgaataatctgaaccacatcgccgcttacaacatcgaaacttgtccgtaacgcttcgtgtctgccaataatctcttgtagaactgattcggcttttttcacatctaattttccgtttagttcaatcataatcggcaagttataaacgatactgtctttatccgtctcccaaagggcaaacattcttttctgagcagatgacgcttgataagaagactgctttctcgctttactgatgaccggataattctgtttatcccgcttttgaataagacggctcaactgtttgatggtaggctgctcaaaaagctccttcacctttatatccgtgccgaatgtttttctgatgcgggaaatagtgaacgcagctgttaaagaatgtccgcccagttcgaagaaatcttcatttatactgatccgtttatgcccaagcatttctttccaaatttcagctagtttttcttccgtttcatttgccggagcttcgtattgaggtactgacaaccgttgcaagtcaggaagaggcagctcttttcgattgatttttccgttagctgtaagaggcaactctttcagttgtattatgaaactcggaatcatatacttcggaagaacctgtgccaatttctcctgtacgaacgagccttccatctcaatgtccccagtaatatatgcagaaagatatttctcctctatataaacaaccgccgcttcttttataccttccagctgtaatagttggttttcgatctctccgatttcaactctaaaacccctaattttgatctggttgtcaatccggcctaaaaattctatatttccatccggcatccatctgccaaggtctcctgttttgtacatttttgctccacgatgaaaaggattatcaataaatttttcattcgttaattcttcattattgacatatcccgatgctaaacctaccccgctgatacaaatctcaccaggtgctcccacagggaccagttgatctgaacgatccacaatatagatattaataccgtgaattggtcttcctattctattgtatatttcacagttttgaatatgatctagatcaatgctatgtgcaatacagccaacagtgctttcggtcggcccgtaatggttaataaacttcatccatctgcatttttcagcgagctttttgacgttgccgatgtttatgctttcgccgcccagtataataacttttaaatcaggacaagacgccagcatgtcaacatcctccatcaatgttgaaaataaagtgggtgtcattttaagatatgtaatactatttttatgaatatattctattaatgatagagagtgaagatacacttctttatcaacaaagtggacttgtccgccaccggataaaactggaaatatactggtatagcataagtcaaaactatattttgacgtcactaacgacctgctgtcagaatttatgtttatttgatcacatacccataatgaataattaactaatgatttatttttcaccttcacccccttcggttttcccgaagtacccgaggtatatataacatatacctcgtcctcgagatcatactgaacatcagggtttgatgtattttggctggtataaatcgatttatccgtaatatccaaacattccgccgcaatgtttttatcagctaaaaagcacaaatctgtaatgaggatatcagctttgctatcttttaaaatatgatttatccgactgaccggtgattcatcatcaataggcagaaacgcacttccggtttttaaaattcccagcatcccaatcattgaatattctgaaggacggatcatcatagccgtaatgctgttttttcctgcccctttttccattaataatgttgcaacttgatttgccttttcgtttagctctttataagtgatatgctttcctgcatagacagccgctgtttggccaggtgtcttttccgctcgttcttcaaaaaggtcttgtatcgttttattcaccgtataattagaggactgcttattaaaatcctggagcattccgcgctcttcttcatttacagcgctgatgtctttcaggacacgcgtaggatcagttgccacttgctttaacacatgacagaaattaacacctatacgattaatgatatcttcacgataaacattattgttatacgtcatctctgctttgatttggctgcctggaataataaccagcccaaagtcatagttcgtctgttcaaacacttccatatctgtaatccttaaagcatcagttgtattatcgaccgccttgccatagtcatcaacaggataattttcataaaccaacatatggttgatcagtttctctttcatctttgtaagagcttgtatatccgctaaagaactgtaaccgtatgatgtattcgctttgataaagtcactgttcagcttttgggctaatgctataaataccgtatcaccatcgccttttactctcagaggaaccgcattgataaataaccccaccattttttctatgccttgcactctgcattgtcttccggaaataaccgcaccaaaaacaacatcatccacgttgttatacttctgcaaaagaactccccatgcagtctgaatcaatgcacttaaagtaatgtgatattgatcagctgcagctttcaacatcgaagtacatgtttcatcaataatgaatgttttcttcctattattgaaaccgccctcatcagcagaactttggaataccggcttgctgctcatattcatttagataatccccccaatattctaatgcggcacttttgtcctgattatccagccattctaagtaggtgctgtaaggctcggtatgctgaagcactgtctctcttccttcttttaatgacgtataaatagtttttatatcattcattattaaactcatacaccagccatccataataatatggtgaaaactgaacagcagtttatattctttctcatcagtttttaatacggttactcttattaagcaatcattcgtcaaatcgaatctcgttcccctgtctttaaactggacatttttaagccggactttcttttgatattccgagaaagtgctgatatcttcaaattcaattttaacttttctctctcttagaacagcctgtttaaacttacttaatccttcatgaaaaaagcatgttcttaaaatttcatacttctcgatcagcatattaaaagctgtatttaatctgccaatatcaagctgaccggataaagaaaatgtaagctgctcaaaataggcttgtgaaaacggatcaagcaatgcatgataaagcatcccgctctgcataggagtcagggagtggattttctctatctcttttccgcttgataaaatctgctccaaatctccgatggataaatccagatctccatagtcaaagggtgttttttcaggaatttttttcattccgcaatgctgaataatatcgattaaccggtttatataggattcggttaatgttttaattgtttcttctttaaactctttcgtactatagttaaattccaactgcagttgaccgtccataataaagctgttgatttcgatggcattcaattttttattagataaagaaacacttgtaccagatgatatatctgcatgctgaaaaacagcccgctttttttgagagatttctcccagatagttaaacccgatctcaggctttatcgtaaaactgatgtcttttttatgtgccggtgccgtcaagtatttaataattccgtaaccaatacctttatgaggtattcttcttaaatactctttcgtattttttatgcaataaggcagatcatcactgtgctccatatccagcacgatcggaaatagtgaggtgaaccagccgatggttctttctattgaaatattttctaatatgttctctcttccgtggccttccagaccgattaaaaccttgtcaagtcccgcccattcttttactgccattcccagtgaacaaagcaagatgtcattaatctgtgtgttataagctgcatttgtattcctctggagcttatcagttaactgctttgtaagactgacagtaatggtgcggctttccttaaatacactgtcagttttattgaaatctctcggaatttctttaatcttcgttttctcgatattctcccaataccgaagttcctttcttatctcacttccgtttgcatattccgccaatttacgtgtccattcttgaaaggatgccgtttttggcggaagaacggccggctctcctttttgcagattgttgtagacctgctccatatcttcaagcagaattctccaagagactccgtcaatcaccatatgatgtatagcaataagtagataatcgcccctcattgttcgaaataaaccaagtttcattaaaagtcctttttcaagatccattccgctttgtaactgatcggcaagtttttctattgtatttttgtaatccgtatcagcaagcagatcatatatgtccagagtaaaagtatcccgggcggcttggacatctctgacttcttgttttatttcgtcattttcggctgtatatatcaacctcaaagcatcatgatgctttactaataattcaaatgtctttgccagagcgtgttcattaattttttctttcacttgaaacatgaatgcctgattaaagtggtgaatgtccgcaaagtcattctctataaaccacttttgtatcggtgccagttcagttctcccgctaaccgggctctgatctgtttgagctttatataatttcacgtgtttactgaggttttttatttgcggatactgcaaaagatcttttacctctagactgagactgtatttttgaagctttgatacaatcagtatagattttattgagtctccgcccagctcatagtaattatcattaataccaatatcatcaattttcagaacttccgaccaaacatttaccagaatctgttcgacttcggaacggggtgcttcaaggtgctcctttatatgtttaggctcttctatttctgcaagtgctttcctgtcaattttcccatttggtgtgagaggcagctgttcaacctggatgatgacaccgggaatcatatattgcggcaaaatgtcacccaattgctccctcaaagctgctccggatattttatattctgcggttacaaatgcagaaaggtatttgtcaccgtgaaggtcgcacttatctataacaactgcttcttttatcccgcttattttcagaagctggctttctatttcatcagtttcaatccggaagcctctgattttgacttgattatcaattctccccaaaaattctatgtttccgtcaggaagccaccttgccaagtctcctgttcggtacattttagttccggactcaaatggatgatcaataaacttctcacgcgtcattttctctttattgagatatcctcttgctaagctgtcacccgacacacacaattctcccgctaaaccaataggcacaagattgttgttgtgatcaattatgaaggctttcagatttctgatcggcttaccgataggaatggtctttgccatcgccctctcagcttctgagtatctccacattgtagagcagattgtcgtttcagttggaccgtaggcattaatatagtctattttattcacgatccggttcaaggattttgtagatatctgagaaccagcagtaattaagagccttaaagctgataatccgtttatatttatatggttgatgtatacaggcggcaaagtggctacagtaatgtcatgccggttaatatactcttcaaataatgtataattattgatgacttgacttgaaaggatgtgtagttccgctccggtcaacagtgccatactgatttcccacactgatgcatcaaatgaaaaacttgcaaattgaataattttatcccggtaattgatattcatatcatgttcaaagacacttttgagattactgattccgatatgccggatcgttacaccctttggttttccagtcgttccagaagtataaatgacataagcaagatgttctgcggaactcatcattggcaggttatgccgatctccggtgtaaagagaactatctgttaaatcaataaccttcccgtcaaacggaatattgtcagcctgactattctgcactaataaaatgtcagaaccgctgtcttcaatcatgtatttgattctctcagaaggatatcccggatcaattggcaaaaatgcgcctcccgccttcagcacacccaatatgcctaacaccatctctaatgatttgtcagcaacaatacctactattgactcttttttcacccccattttcattagtattctcgccagactatttgatctttcgttaagttctttataagttactttattattttcatacactgccgctattctttccggtgtcttttccgcttgttcttcaaacaattgatggattgtcttattatgcgggaagtcggctgctgtatcattgaatacataaagcagtttatgtttctcatcatccgttatcatattcagtctgcagattgccgtgtccggttctgatacaacctgttgtaaaagccgggtataatgagcacccattctttcgactgtgtctttcctgaataaatgattgcaatattccaattggaagttaacgccttcatcggtttccattgcagttaacgttaaatcaaatcttgatatattgacctcagataccagtaaatttgattctgctgtctcttcatttcctccgaatccgtaatccttactctcaaaagtaaacatgacatcaaacagcgggttccggctcgaatctctttttaccccgagtttttgaacaatattttcaaattggtaatctgtattctcaaaatcttttaacgtatgatgtttgacctcttctaaaaacgctctgaatgttttatgttcctcaggaaaatttcttatggcgacggtattgacgaacatccccaccgtattctccagttcggtgtctgaccttccggactctgccgttccgatgatcacatcctgctgaccgctgtattttgaaagcatgatattatataccgccagcagcaccatgtacaaagttgttcctgtttctttcgccaccgactttaagcttgatgttaacctttcatcggccgtaaagctgactcggcttccttcaaagcttttgactctcggccgctcgtaatcagtctgcagattgagaatcggcagatctccgcttaaccgcttaagccaatactcctcttgttcctttaacgcctcttttgttcctgagcttacttgccattctgaataatctttatattgcagcggcggctgttttagtttatgatccgcatacagcgcattgaattctttgcggattattccaaccgatacaccgtccgcagcgatatgatgaacatctaacagcagcagattccggtcttcatacgttatgagtccggctctgattaacggtgctttgtccaaatgaaagggtctgataaactgcttcacatatggtcgtatcccatcagacggcagcttctgataatcaaattcgagctcccatgtatcgtgaataatctgaaccacatcgccgtttacaacatcgaaacttgtccgtaaagcttcgtgtctgccaataatctcttgtagaactgattcggctttttttacatctaattttccgtttagttcaatcataatcggcaagttataaacgatactgtctttatccgtctcccaaagggcaaacattcttttctgagcagatgacgcttgataagaagactgctttctcgctttactgatgaccggataattctgtttatcccgcttttgaataagacggctcaactgtttgatggtaggctgctcaaaaagctccttcacctttatatccgtgccgaatgtttttctgatgcgggaaattaacatagaagcctttaatgaatgaccgccgatttcaaagaaattttcatctataccgacgcgttccctgccaagtacagcttcccaaatctccgaaagttttttctccgtttcatttgtcggcgcttcatattttgtttcggacatttgagatatatcaggtcgaggaagtgcccgtctgtcaattttcccatttaccgtcaaaggcatgttatccatttgtttaaagtacgatggaaccatatattccggaagaaagtctctcagaaagtgctgcaattcaatctttgcgattttatgatttgaagtgtaataagcacagatatataaatcatcatcaccattatgatttactgttactgccgcttctttaatttctgtatgattgatcaatcgggcttctatctccccaagctcgattctaaaaccgcggattttgacttgctcgtcccgccgtccgataaactccacatcgccattttctaaataacgcactaagtctcctgttttataaagacgtgctgaaggatcattattgaaagggtgtgatataaaccgttccttcgttaaatcaggccgtcgccaatactctcgcgccagcccatctccgccaataaacagctcaccaggaataccaggcgctaccggttttaattgcgaatctaaaatgaatatttctgtaccagaaataggcctccctataggaagcgtactgcctttccaatcatgagggaccgggaaacaacaggtaaaggtcgttccctctgtcggcccatatccgttaattacttgtacctttccaagtgctaatactttttgaacatgcggaacggaaaccacatctccgcctaccaataattgctgaagcccttttaatgattctaactgctgatcaactactagagaaaataaaccggccgtcagccaaagagtcgtaatgttatatttttttacagcttctgcaatatcatcagccgtcggtattcccggaggcattatagccagacatcccccattcaataaacagccccagatctcgaaggtagaagcgtcaaaagcggcagaagctaattgcagaaacgtttgattctcatcaaataccgcataatcagtctccttcaccagccgaatcacaccgcggttaacaatacttactcctttaggcagtcccgttgagcctgacgtatacatgacataagccaggtcatccaaggaaccttttatgccaatattagatccatccatcttttcaatttcttctttcataccatccaaacagattacgccgtccccgtgaggcgggagttgtgactgaatgctttcgtttgtaatcagcaactctacacctgaatcttcgattaagaatgatagtctttgcttcggatattgagggtctaacggcacataagcaccgcctgactttaatattgccagaatactaatatacaaatcaaaagagcgttctaaagcaattccgacaaggtctccccgttttactccgcactcctgaagataccgtgccagctggttcgcacggtgattaagttctgcgtaacacattgaagagttttctagtaccaaagcagtcttatccgaatattcatcagcctgctgctcaaacacctccgaaattgttccaattttcgaataattatcttcccagccaaagattttcttttgcttatttttttctttcaggaatctcatatctttcactctgatattttcaggagttatcatagcttcaaggatcatctgaaatcgcagtgacaaatcttttatcatattttgagaatagaggcattcgttatagtgtatggctgtctctatgtattgtttctggtttataaacgaaaataggatatgaatagcgggattttcttgattaagtatgtattcttgaatattttcaaggactatcatgacatcaaaaggaaggccagtcattttatcacttgttcgagaattattttgggggctttccaatgcctgttctacggtgaattcgactttatgtatgatctcttttaataggtcttcaccatgaacagcatttttaagagtcaaaatttcttgctcagaatcaatcgttctgttctttctgaaaacaggagtcttgattacaatattttgtctttctgtatattgatttattaacaaagtcagtgccgctgttaatacgacatgcagacgttcatccgatccattgcagcatacattcagcttatcgcttaattgctgtgacaatttatatgtaagatttttcattcttttttctttagaagatttacttcccactaaaaaatgctcttcagtttttaactcaccaatactgtttttatctccctttatactttttgtcataacaaaaactccttcacttgatatcaaaattcaattcattcactgaattaaaacagcagaggctttcggtggatttttatgttaaactgcatcacaggcaataacgctcaccaataattgttgttgtagtctgacagtttatttatcggcagcaaaaaccattttttaatgatatagacccgtataaacactttttttaaaaaaaggataatgaagaagaactagccatctttaagaaatattatacaaatatttaagagttgtcaattagcagggaaaaacacctaagcacattaacccagtttttatttttcgtattaacataaaaaaaccgggacaaagtaacactcccgatttttcaatcaacaatttatctcaaggttttatttataatgtcagttatttcattcgaaaattgatgaataaaaaagtgatttccttcaaacgtataaaaattgcatttccctaaagtataatgtccccaattacatattaaatctgagcttatcgtcttgtcattaataccatgcaacactgttatatcacagtccataacagtcttattttcagaaataacatccttttctaacattttgaaatcacttcttaaaataggaagatataattgttgtaattccttgttatgtaacagttcttccgaagtcccgcccatatccatgattctttgcaaaaataaattatccggcaaagcatgaatcatcccctctgcttttttcgttttaggaatgccgcatccggaaaaaaatatgtgattgggcttcttctgctgcatttcagcaattttacaatataacttataaactaatcggcctcccatactgtggccgaataaagcataatcacactccctgatttgatcctttatcagatcatatatatcattaacagcctcatctatatgttcataaaaatcttcgttaattcttgtacctcttccttttaactcaataggatgtattgttaaagagtcactcattaaccttctccatttatagtatattgcacttgatccccctgcatacggaagacaaaatatttttttcataattcacctcagaaattttgtaataacccgataaaaaaacaccctgaaaaggatgtttttactatctcattttatatatgaaatgctcttgaaactccgttgatgatgaggaagattcctattactcttaaaatgatccttgttgttctgttatcttttccaaaagcaacttgcccgattttaccgataaatacattcatgagtacacctataattaattcagccattccaaatagttcttccatacccaatttcctcacgtcctttttgatctgttaattttatccgattattgttgatttaattttcttttttaatctccctgcttatcaagatgaaagatacaataatacttaataagccgacacttgcaaaaattacgatcggaagccattcagttcctaaggtactcttactaaagataatgttgtttaaagactgtattgcccatgcttcgggtgtaaatttagaaataacctgcatatattttggagcaatttccaatgagaaaaaggaaccgcctatcatcccgcttactgcaattatgatcgatgcggcagaagtaaactgcttttggcttctcataaatggaaccataatcatcgtaatgcaggtcaatgcaaataaataaacagcgagcataacagcgatggcaaagatgttatgacctatgctgatcttgagtaagtattttcccgcaagtattataacgattatatgaatgattccggaaatataagtagcagccattttggataaaacatattttgtatagtttataggcgtacttagtaatcggctgaaagtattattctctttttcatcaataagtgttcttaacccttgaataacaacaaaccaaataaacattacaagaaaaccaattaatctcacggtcgcattatcctgagtatgtttaccctggcttaatgttttgtcattcacttctattcctgaattgtttttcaatttcttgaaaatgttcttttctatatcttttgagtccgtatgcaactgcgcagacatatattgcgaatctttaactacctttttaagagttcccgcctcatttttgaccagctgctctaacaatgttccgctgccgttctcatagttttggatgattttcatttttatcttgtgattgtccgccaattcctttccaaaacctttttcaataacgaccccaaaaggaatatcctgatcatcgacttttttctttatttcattttccgttagctttataactttaatatttttatgctcttttatcatttcaatgagctttgcagcatagttgcttttatcagcattggctatatacaagttctctttgctatccgtatcttgggaaaaagagaacaaaaatgtaaggattaacggcactgaaatagttgcaaaaattgctaatctatttcggagcatcagcttcagctgatgtttaatcatggcaatcaattgcactactacgccaccttcttcctgttgaataccataatattaataaagacaaagatgagaccaataccaattagctcaagcaaatcaatatacatgccgctaaggccaatattctgtttgacttttaaataagagtttattgccttaccgttcggtatgatctcttggacaaccctcaagctatcaggcagtccgttcttaggaataaaactgcctcccaaaaaactaaaaatataaagaaccggagaagccatactggacaccgccacgtggtccttagcggtaaaaccccaaaacaatacaatgctgcctatagcaaatgcgtatactaccgtaataacaaaaatatcaaacaagttgccccagttcattcggaatacgacccagcttatcagaataacagcagtcatctgcattaagatcgcaaaaataatacctgtcaactttccaagcacatactgaatatttaaagtcggtgtagatttaattctgaacagcgtattattctgccgctcatcaacaatgctatgaacaagcacaaaagccgtcataatggaaaacataacaaccattgcaattgaataatactgcatggaatcgacaggaaccgcatttttatttgtcgctgcttttgggatatcagcggagatcccgtcattatcggccaaatcgttcatcattttttctattttttcttttggtacgctgccgccggggctgatatgttttattacttcttgttgctcagcactcattgttttcacgcttttcgtaaagccctccaaaacagcctgaacaatatttttatctatggtcttattattatctccaattaaatcgatatttgttttcccgttgttcataacggctttcgtaaagtgttccggtacatagataaaagctgcagcctttccttctttaactaatttttcaccgtcattgtagctctcagcttcttttaaatgaatgatatctttgagatctcctttcttaaaaactttatcctttaagacatcacctaaagaaacactctctcctgaatctgctgagtaaaaagctacatcaaatgcttcgatttttgaatctgaattactgaacacactgcccaatatgaggattagcagtgatggaaacagcatcagctttaaataaaatgacttattttttgttaacagcttaaaatcaagaaaaaataagttgaataattttctcaagatagcctcctcctactaatctcttaggtttttccctgtaatttgaaggaaaatgctttccaaatttacttcctcgtacttaaagctagtgaggtcgatccccagatttttgatatcatctacaatttcaatgatgtttctttccttcgtcgatacaagcattgaaatttgtttatgatctaccgtcactttatcaattcctgtaatgctgtttatccggctgagtgcctcttcatcagcacccttaaaagtaacagttaaagtgtcacaagcatttaagttttccttgagttcttctttcgttcctaaagcaataagagatccatgatcaacaattgccaccttctcgcaaagatactctacttcttccatatagtggctggtataaataacagtcattcctttttctttattcagcctttttactgtttcaagaatatgatttcttgattgcggatcaattcctacagtaggctcatcaagaattaataatttaggattattcattaacgccacgcctatgttgacccggcgtttcattcccccggaaaactctgatacattttgattttttttatctgtcagttcaataatctccagaacctcatcagttctttcttttagctttttccctttcagcccgtaaaggcttccgaagaagttcaagttatctttggcgcttaacgtttcatataaagctaaatcctgtggaacaacccccattattttttttatctcaataggtttttccttaagtgatttattatctactttaattgtcccgctggtaggtgcaagaacagtgctaatcatagaaaccattgttgatttgccggcaccgttaggacccaatagtccgaatacttctccatcttctacagtcagcgaaatattattaactgccgtaaagtcatcatattttttggtaagtttttttaattcaagcataattaaaacacccctcgtggtatttcggttcttttattttaacctgaatggaatatttttagaatttactatagtactcatttaccttattactttagttacgaatcgcatcgttactttagtcatatacggaaggtgtaagtccggatatattcagaagaaaatggaggaaaggaatttgatgaaattcctttctgattgaaggaaaaaagttgaatcacatatgcttttgtaaatataagctaagctccgttcggttgttcatttgaagtttttccagtattcttgatacataatttttgactgtgccttcagtaataaacagtgcttcgcttatagctttgttgcttttcccttccataatctgtttagcgacttctttttctctgggagtaagcaattgcaccagctgttccttttcattattttcttgaacaagctctttattatgttctaccgaatttagagcctttacaacttttagcgttaccttaggatttaacagaatattgccttcacatgctgttttgatggaatcaataatttcttgtgaatcagaatctttcagtatgtaaccatcagcaccgcttttcagtccagtaaaaatgtattcactatcgttaaaggttgtcaggataatcactttaatatccggatatctctctttaactagctttgttgcttcaatgccgtccattacgggcattcttatatccattaaaatgatttcaggccttatctgttttagcaaatctaataaatgttcaccattagaagcttcgcctacaatattaatttcctcgtgcagactcagaatcattttaagcccttccctgacaatttgctgatcatccacaatgataatatccatatcaatacctcctcacattccgattaaagatctgctatctcggggattacggcttccacagtaaatcctgaatctagccctgaataaaaatcaacctctcctccaagtgcggcaaatcttttttctattccgtttattccatttgacttattaatttcagaacatcctgttccgttatcagttatcgatatagagattttttcaaaagacttacgtatttttattgaaaaaaacgtagcatttccatgttttatcccgttggttatagactcttgtactgttttatagagacaattcttgatatctggatcagctgactctactttattgtccatatcaagctcgaattttatttcatttgtttgctgaaaattttcaaaaatctcattgatcgatttcagaagccctttttgaggagcagggtcattgagcaaagcgacagcttctctcaggttaataatacactccttcgataaatcatgtgacttattgatgacttgtttagcctcgccgggatttttacttactattttatcggcgaattcaagattcattgttaatgcgatcaaataatgccccagggaatcatgaagctcttgtgcaattcttgtccgctctttagaaatagttaactcttgaattttttgagaataattcttaagtttagtgtttacactttgtaattctttatttaatgtttgtatttttgctttttcgagcagtacgtttctaaacagataaataatagccatgatcactaaataggacatcaatatatctttcccgctggtccctgctgctttaagagctgtaaaaaaaataataaaatgcagacttactacagtccagggcagtttacgagttgttacaataatctcgatcagtaaaaaaatattatatatttgagaaccgagacagttaattttaaacaataaaatgcctgataaaaggttacttactaaaaaagatgcataatatctaaaagaatactgaccgcttaggtattttaatctgatatgatcgttgacgactaaaaaaatggtgataatcagcaggtaagcggattccgaagccgtaaaagttggcgttttaaaaatagaactgataatagaatataaggaaaaacaaataatggttttctctatgagcactcttgtactaattgaagaaagatttttcataataatccttcccgagacaacttgatataaattatattatacatatattgagaaatcataaagcgacaacctccacgttcagcacatcatacagctcatcaagcgaatgaatttcatacgtcgggataatcccggactcatttgctttctttccgggattaaaccagcacgtatccattcccgccatctgaccgccttttatgtccgcgctcaatgaatcgccgataataagcccgtgcccggcagaaaaaccgggaattctcgcaaatacataatcaaagtattccttcatcggcttttgaaaacccgtgtcctcagatacaaacacatctttaaaaaacggatacagaccggagtcgcccagccgcttatattgtgatcttgagacgccgttcgtcacgatgtataaatcaaataaaggactcagccgttcaatcagctcataagctccgtctatcatctggtgcccttcttctaagtattggcggtacgcctgattcatcagcacgccgtcggcttcaaggccgtattctttaaacaaaagggcaaaccgtgtattcaccacttcatcgcgggtcatttccccctcttcaaacgccttccacagcccttgatttaacgctttataacgggcttccacctctgccgtcagctccagctttgaaccttggaacaatttttgaagagcatcggtttctgaagcggtaaaatccagcagcgtattgtctatatcaaataataacgtacggtaatgactcatcgatgtttcccccggttctgctttttttaaccagtataccactcgcggacaagccgaaaaagacacccctgtaagagaggtgtctttttgaattatacagcgtcttctattttcgatttttcaccaggcatgcgcttgccgataccgaacgcataatagctgaccgtcacaatcgccaggaaaatcaccccgacaaccaaagaaatccgcgtatctttgttaaaccacatgccgatcaataccatgagtaagaaagcgatcgtcaaatagtttgtaaacggcgcaaaaggcattttaaacggatgcttatcaagctcagcgcctttcgctcttctgaaaccgagatggctgatcaaaatgacgaaccacggaatcattcccggcagcacactcgcgctgtacacataaacaaagattttcggaggcgcgatgtagttcagcacgacaccgatcacaagtccgattaataccgcaagcgtaccgaatatcggcacaccgctcgaagaaactttcttaaagaatttcggtgcctgtccgttcacgcctaacgtataaagcatacgtcccgcactgaatatcccgctgttgcatccggacatcgcagcggtaatcaccacaaagttaatcagaccggccgccgccgtaatcccgactttcgcaaatgtcgaaacaaacggactgccgagtgagtgaagctcattccacggatatacggtaacgattacgaaaatcgcaccgatgtagaaaattaaaatccgccagataatactctgaatcgcgcttcgcagcgttttttgcgggtccttcgcttcccctgccgtaattccgatcagctcgaccccttgataggccgcaacaaccaaagacaaagcaaagaaaaatcctgaaaaaccatttgtaaagaaaccgccgtgcgaccataaattagataatccgatcgcatgccctccgttaccgaaaccgaagaaaataattccgattccggccacaatcatcagaataatggtgacgattttgatcatggcaaaccaaaattcaaactcaccgaaagattttactgaaattaaattcgccgcaccgagaatggccatggcgataatgccgggaatccatgccggcagatcaggaaaccaatatttcatatacgaaccgacggcgataatttcagacatcccgacgatcacccattgaaaccagttgctccacgccgtcatatagccggctaacggatgtatatacttatggccgaatgtcgcaaacgaccctgtactcggctctacatagagcatttcgcccatcgcacgcatgataaaaaagataaagatacccgagatcgcataagccagcaggacagacggcccggtccatccgatcgtgctggatgaccccatgaataaaccgacaccgatcgtgccgcccagcgcaatcatctgtatatgacgagcgcctaagcctctctttaattctttgtttgccacttcgcttcctcctcttaacagctctgatatatgtgaaataatgaagcagaaggtgcacctgttgaacctaactcactcttcatttcccgcaatattggaaatattctatcttcctatcgttatataatctccaatttccttattccatcataataaattttcgtggaaaatacaattgtttttttcaggcaaacaccttacactctgaaccaacggactaaaaataaagcgctttcatttttattgaattgtgaatattgagataataaatgccgcagcctccgagaaacattatttcccaggagaaacgttttccgccccctatccaatattatttttgctaagcagaatggcgtaaagccttactctcttccattctcccttgtatacgccataatcctgcttaacccggcaaaaatcatgcattaatcgataaatgcctcattcagccgcagcaaaagccggccgaacatttctttttcatcgccggaccaatcgtcaagcatacgatgataccgctcaagacgcatctttttatcagcttttaacctctgtttgccaagcttcgtaatcgcaaacagactgacccgcccgtcagaaggatcggaaaaacgctggatcagctctttcgactccaaggccgctgcctggcgtgataatgtggaaatatccagcttaaatgattcggccaattccttcacacgcgccggcccgaattcatccagctgccgtaataacaaatacgcagccctttccagatgtccgattttacggtcggagttatcaagataaacagctctcctgatgaaagtggtgagttcatattcaattaattcaatcggatcttgttttgacaaacgcctcactccttacattgacaacagcaacattagttgtataatacaaacatatgcacatttactcagaaaacatatagaaagattttgcatacatatatttgtatagtacaaatatatgtgccaaaagtaaagaaacttatagaaacatcaagaaagggggaagctgctcttctccaaagaacagcatcgttgtgaaagtcatacgcatcatcttgcaaatcattattttattcgcattttcctttatcgggggagccgttcagcagttctttcacctgcccattcccggaagcatcatcggtttgatcctgctgatcatatgtttatcggttaagatcattcccgtcaaaatgattgaagacggagccggatttttgctgtcttttcttccgctgttattcattccggccatgacgggcgtcatcaattacccgtcactgttttccgccagcggggctgctctgtttctgatcatcgtgctgagcaccatcgtcacaatgatcgccgcagggtacgccagccagctgttagagcataaagccaatcagagaaaggagaaaaagaagtgcagcaagcatgtatcgcaatccttataattttgttcacggccgccgcctatctggctatggtgaaattatatgtgcgctttccatacccctttctcataccggttttgacgactacgattttcattatcgccgtgctgcttgtttttcatattccgtataaagactatatgatcggcggacaatggatcaattcactgctcggccccgctgtggtggctttggcatacccgctttataagcagcgccgggtgttaatcaagtatatgtttccgatcatcggcggcgtgttggccggtttattctccggaatggtcagcggcctgctatttgcagagctgttcggcatcagccggagtttgattttgtcaattatcccaaaatcaattacgacgcctgtcgccatacagattgcgtccggtatcggcggtgtcccttccatgacagtcgtgttcgtcatgatcgcagggttttccggcgttatcttaggaccgctgcttctcaagtggatccgcatccgcagctcactcgggaaaggaattgcattcgggagcgcctcccatgcgctcggcacctcaaaagcaatggagtacggagaattaacggtctccatgagttctgtttccatgacgctctgcgccgtgttagggtcggtcttcggccccgtcgtagcatggatgtttcaaatttaaagccggcggttctccgtcagcttttttcatgtgcggatcatctcatttccttccattattatgtttcatttgtaagaataatggtaaagtagaaaacaaggagggatttaatgatgactggggcaattccgcaaaagaaactgcttgatgggacaagcattcccgcgatcggcttcggtacatacgctcttaatggaaacaatggcgttcatgccattaccagcgccattgatatcggctaccgtctgattgacaccgcttataactatgaaaatgaagggacggtcggagaagccatccgcagaagctctgttccgagagaacagctatacgtgacgtccaagctgcccgggcgctaccatgactatgacaaagctgtacaaaccatccaagaatctttataccgcgccggtctggactactatgacctgtatctcgtccattggccgaatccgaaacaagaccgctacacggaagcatggcaggcactgattgatgcgaaaaaatggggcctgatccgatccatcggcgtctgcaatttcctgcctgagcacatcgaacggctcgaacgtgaaaccggtgtaaagccaggcatcaaccaaattgaactgcatcccgcttttaatcagcagcagcagcgccaatggcacgaagaacagggcatcgtgacagaatcatggagtccgttatcccgcgccggcgaagtattgaacgatcaaaaactcggacagattgcggacaaatacggcaaaaccatttctcaagtcattttgcgctggcatatccagctgggcgccatcccgattccaaaatcagcatcgcccgagcgccagcttgaaaacatctctgtttttgatttctcccttgatgaaaacgacatgagcatcatcgactcgcttacccgccccgacggacggataaacggccaagacccggcggagtatgaggagttttaaaaaaacacataaagaaaagctgacggcatcatttgtcagctttttcaccttttactctgggatagccaagactgtgaaactttgcagtaaaggctggaaacacacttatcctattataaattgatcagctgctaaaattcttttttatgatatatagctgcggcgatgaaaaatgaaatgatatataagataacgccgatcatgagatatataatcgggacatataaagaaggatttatgtgcaaaaatgacagcggtacttgttctgctgcatacccaacgacactttgcaatccaaaggtagcaaaaagtccccccattgcccctccaatcacgatagcatcggatttttccgggcctatcatgtagagaagaggataaacgattgcaccggcaaagagaacgatgaacgttccaaaagagacaatattaaatataccgtcaattggttcatcagaacccaggctgtatacaaggaaaataccataagatattacagctccgatcacaacaatcaaaagataaaagaaatagtgactttgaacaatatttgttctgctgaccggtaaagtcagaacatacctgtcatagcctgacttgctctcatactttataacctcaagtgcgggcataacgacaaacaaaataatcagcatagcaacaaaacgatgcattgaagcatccccaaaataaaaaatgactgctgataccaatatggccaaccccgtgtatgcaaagaaactccgataaaccaagtaatagttagtcagtaacagacctctcaatgttttcactcctcgttaaaaagacgctgatttcttctatggaaatggtgttggccgttacgccattcggcaatttctgttgatccgatacaagcacactccaataagatccatgattcctttttgctagaacgatatcttcgtcaatctcagccaattgaccttcatcaacgtctataacggtatagctttcaagaaccttatctttctcttcatttaataaaatttcgccatctttcatcataatgatatggctggctatcttctcgacatcagtcataatgtgcgatgaaagtaaaatacctccgttgcttttactcacaaagctttttaattcatttaacagatcatctcttgaagagggatcaagccctcccgttgcttcatccagaagtaataattttgcattatgcgacaaagcaacagctacagataacttcattgacatgccgcgcgagaatgtattcacttttttatccataggtaaagagaaagaatgaaccaaccggtaaaattgatcttggtcccaagcgtcgaacagtttcttaaatacatgattcagctgctttatcgtaaggtgcgcgggaagattcatcgcatcaaatacgaccccaatatcttctttaaactttatatgtttatccagattctctttaccaaagattttcactttacctctatcctgagagattaatcctaatatcgttttaaatgttgttgacttgcctgcgccgttatcaccgataaaaccgacaattgatccggcaggcacattgaatgtaacatcctttaaaacagctttatgaccaaaagatttgctgatgtttctgatttctaaaaggtttgacatcattccactcctatcattgttgtcaggacttttttaagaattgaaccggattattgtaaaaatgttgtgattttcatatctggtctaggtattcataatggatcaggagtcgggaaatacaaaagggattttaaagtcttaagcataatatggaagtgtaatcgattgattaggtttatataatgggatattcatgatgaaaactgctgaggtgtttactttccgatgaggtatacacaaaatgatttactaatgattacatttatggattttaaccggaatgcatctcgtattataaagcaggtgttactccttttcaatatataaaaggggatttctttacaatcgcaaagagtatgcatttctcatttccgcattaaaaaacccctctggctaataaccaaaggggttaaatatattattccacagtcacgctcttcgcaaggttgcgcggtttatcaacgtcacagccgcggtgcagtgccgcatagtaagcgatcagctgcaatggcacaacagaaaccagcggagcaagcgcagggttgacttccggcaggatgaatctgtcgtctgcgtcttctaagcctttcagcgagatgatgcaagtgttggcgccgcgggccgcgacttccttcacgtttccgcggatgctcaggttgacgtgttcttgtgtcgcaagcgcaaagaccggtgttccttcttcaatcagagcgattgttccatgcttcagctcgccgccggcgaagccttccgcctggatgtaagaaatctctttcagcttcagggcgccttcgacacacacgaagtagtcaaggccgcggccgatgaagaaagcgtttcttgaaacagtcaggtactcacgcgcgatcatttccatttcgtccttctggtcgcagagggcttccatggcgtttgccgcaatacctaattctttgaccaaatcaaaaccgatatcaacgccgttgcgttctgctgcaacggacgcaacgatcgcgaggacggcaatctgagccgtatacgcttttgttgatgcaaccgcgatctcaggacctgcgtgcagaagcaatgtgtaatccgcttcacgggaaagcgttgatcccggaacgtttgtaatcgtcagcgctttgtgacccagcgctttgacttgaacaagcacggcgcggctgtccgctgtttctccgctttgagaaaggaagataaagagcggcttcttagacagaagcggcatgttgtaagagaattcactcgctacatgcacttcaaccggtacgtttgcccacatttcaatatattgtttcccgacaagaccggcgtgatagctcgttccgcaagccacgatataaatgcggtccgcttccgccacggcgtcagcgacatcgcccgccacggccagtctgccgttttcgtcctgatacgtttggatgattttgcgcataacaagcggctgctcatccgtttcttttaacatgtagtgagggtatgtgcctttttcgatatcactggcgtcaagctcagcgatataagacgcacgtgtcatgacttcaccgtcaagatttttaatcacggcttcgtcttttgtcacgatcaccatttctttgtccaaaagctcaacgtattcattcgttacttgaagcatagccatcgcgtcagatgccacgacgttaaacgtatctccaaggccgattaacagagggcttttgttttttgcaacgtaaatggtgtctgtgttttcaccgtcaaataatgcaattgcgtaagagccttttaacagagtcagtgttttgcggaacgcttcttctgtgctgagtcctcccgccacaaattgctcgatcatttgaacgactacttcagtgtccgtgtcgcttttcagttcaacgttttcaagatactcgcgcttcagctgaacatagttctcgatcacaccgttatgaacaagtgtaaagcggccgagtgcgctttgatgcgggtgagcgttcaggaagcttggttcgccgtgagtcgcccagcgtgtatggccgattcccgcttgagattcaaccgtgtggtccaccacttcacgaaggtcggcgatgcggcctttttctttgtacacatgcacgccctgctcattcgccacagcgataccggcagagtcatagccgcggtactcaagcttctctaatccttttaacaaaatctctttcgcatcaagctgaccgatgtaacctacaattccacacatattttcttcctcctaaaggtgtaaaaggagacgaagaaagtcaaattacaaggggactttcaatcgtcccctcccacatgtttttttggaagatcatgtgatttccctttgttcggagagtcgcccctccggtttgaagaaatccttacggctgtgatctaaatgaatcagccgggaggcatccgccgaaaattcgataacctccatcctcgtcaactaagccgtttttcgggcgcttagttcgggcgctgtaattataaaagatgcaaacaatcccgcctttcctgcaagtgaaaaacaaaggctgaacaagcttgattttacagcatgtgccaaggacggtcaattattttttgccgccccggcatcatgtttactatcattttatgctgatcgcacttgtcttgttcgctctctgcttataaacttcgctactccgctcccatttctgtccgcacgacatccacgatttttgtgacatattcgtcacaaagctcttttgttctcgcttccgccatcacgcgtacgagcggttcggtgcctgacgggcgcactaaaatccggccgtctccgttcatttctttttccacttcagaaatcacggccttcaccttagcgttttcttctaccttatatttatccgtcactttcacgttcactaagagctgcgggaattttttcatttcatccgcaagttctgaaagggttttgccggacgccttcagcgtattcacaagcatgatcgcggacaaaagaccgtcgccggtagtgttgtaatcaaggaaaataaggtgccctgactgctcgccgccgacattatagccgtcttttttcatcgcttctacgacatagcgatcgccgactgccgtttgaacgcttttgatttcttctttttcaagcgctttgtagaaaccgaggttgctcatcacggtcgatacgacggtatcatccttcagacggccttctgatttcaaatacttcgcgcatatgtacatgatctgatcgccgtcgacgatgtttcctttttcatcaacggcaatgaggcggtcgccgtctccgtcaaacgcaaggccgatatcggcgtttttttctttgacgaaagcactcagcgcttccgggtgtgtagaaccgacgccatcattaatgtttaatccgttcggagacgtccccattgtagatacgtcagcatcgagatcggcaaaaaggtgcgtcgcaatggaagatgtcgcaccatgggcgcagtcaagcgctacatgaatgcctgtaaaatcttcgtccgccgtctgttttaaaaattgcagatacttttgaacgccttcaaaataatcgttcacaagcccgaggtccgcgcctgtcggtctcggcagcttatcttccggttcctccatgagacgttcaatctcggcctcctgctcatcagaaagcttaaagccgtcccctccgaaaaatttaattccgttatcctgtacggggttgtgagaagcggagatcatgacgcccgcctcagcatccatggctttcgttaaataggatacccccggcgtagaaataacgccgaggcgcatcacttcagctccgatcgataaaagtccggcgacaagggctccctccagcatatgtccggagatacgtgtatcacggccgatcagcactttcgggcgctgcttatctttggtcaggacataaccgccaaaacgccccactttaaaggccagctctggcgtaagctcgctgttggcaacacctcttacaccatctgttccaaaatacttgcccattttgtatcgctcctttttcattctgttgaagaagaatcagcgcttgatccgtcttcatcctggtcttgattttgatcctggttttgacttttattctgatcgctgtcagtgtcgtcttcccggttcttgttcttgtctttgtctgcgtctccgcttgtgccgttcttattgccggaatcagcggagccgccgtcatttttatttgaacttgtgtttttcttagaagtcagcttgatcttaaccgtgtcttttgacagggaccatgtgacgttttgcgggccgtttacttcaagctttacagagtgctctccgtcatccaagtccgagacattggcatacagttcaatgtccgactttttcagcgccttaatgttggcgggagagcctttggccgtaatatttatcgcctgcgattcagggtcgagaaactcaatctgctgtgagcctcccagtccgaccgtcttgattgcgacattgtcaaaatcctttttgtcttcactgtccactttaacatgaagcgtgattttttccggtgataccttagtgacacccttaggaagcgggatatcggcattgatatcggtatctttatcaattttgcctaaatcaagagatacgccgtcaataaattcaagtgaatccagcacatcctgcgggccgtaaaccgtcacctcactcggattcgagtcaatgctcgcaacgctcaccccgtccggaagacttcccttcctttcgattttgaaaggaagctttttgctcggactggctacgggaaccgtcactttaatgactgacggttcaacatcaacaggaagtgcgttgccgtctttgtcatagacggtcaccttcacttccttttcaatggtctcatttgcattttcaaggttcacagatgctttgacaagtgaaatgttatcaatcacatttttcgaacctgtaatctgcacgtttttcgggctgataatcggctgctgaggggtatatccctttttcattttgcttttattgtagtattcaacttccacgggaaaactctcagccgttttttcctgaatcgtaaccgtcgtgactgacgggtttatggagatcgtcagtccgtccgatacgtttttcgccttcaattcgaccttatgagtcccggtcttcagcttattcatatcggcgtatatctcaaaattcttcgtctgtctcgcctttttcaccgcgcttgtcgagcctttaatcgtgacatttaccgtctggggcacgccggtgacgacatagttcgcttcatcgtagtatgcttttacaggaatatcagtaagcgtagcctcgtcagtcgttgatgtcggaaaaaaggattcccccggctttttcggagtcggcgcctggttgttgttaaccgcaacgtaaagcagcagcgccaagagcaatgcaatgatctttacagcccagcggttgtttaagaatttatccatttttcttgcccctccagtaccagcggttagaagaagtgtctctggcgttcttcttaaactcggcttcaagcatttctttcagtgcttcttccgtcaattctctgtgaaggtctccgtttctggccacactgatggcgcccgtctcttcagatacaataatggttaagctgtccgtcacttcactgatgccgacagccgctctgtgacgcgtccccagctcctttgaaataaacgggctttcagaaagcggcagataacaggcagccgcagcaatctcgttatttttcataatgaccgctccatcatgcagcggtgtattcgggatgaagatattaatcaaaagctccgagctgacctgcgcattaagcgggatgcccgtctcaatataatcgcccattcccgtatcgcgctcaatggcgatgagtgcgccgatgcggcgtttcgccatgtagctgatcgattttgtaatcgcttcaattgtcttatgctgcgcttcctccacaggggttccgctcctggaaaagaaccggccccgtccgagctgttcaagcgcccgtctcagctcaggctggaatataatgatgatcgctaaaaatccccatgttatcgcttggtccatcagccactgaagcgtgctgagtcccaaatatgaactggccatccggaccaatacgatgacgacgattccttttaaaagctgaaccgccttcgtcccgcgtatgaccatgattaatttatatatcacataccaaacaaggagaatatcaacggcattgccgaggtattgcaaaaatgggatgtcctcaaaagccatttcctcgtcctccaagaattcagtcatttcgttttttccgttatgaattgtgctgcatgagcaatatgtacatcatatagcgtgctcattataccacattttgatttctcaagtgaaatgagccggcgcggcgttgcacaaaaaaagagtaaagcgattatacgctttactcatcttcattcgggtccaaagcgcttacgacgccctgtcccgccgatttcagttcgtaccagacccagtcaaacaattggttaatctcttcaatctgcccggtgacttgtccggctgaggccatgtatttttctccgttgacgacggtcacattgccgtcgacttttccttcaatgaacagcttgccgttttttactgtgacatcgccctttacggtctcgccttcagggacggtgaccgtgtgattctgcacgacaaggttcggctgtttggacacactgaaattgtggtcattatgccagctgttgaaaaaaccgccgcccattaaaatcacaaaaaccgctgcggctgcaatcatcggatgagttttgatccatcgttttacagaagcgcgttttttctcttttggaagattcgccataactttggcagtaaaatcagcaggggccgtgacatgcgatgtgcttcggacgagtgctacggatttctccatttcatgaaaatgccgtttgcaattcccgcatgactgcaaatgttgttttaatacgttttcatcttcaggaaggatatctccatcaagatgcttatgcataagctgcacaatctgttcaggacagctcatttcatcaccccacttaaagatccctcaattgttttctaagagcctctctgcctctgtgtatccttgtcttgacggtgccgacagggatattcagaatctccccgatttcaattaaagagagttcgtcaatatactttaatacaataaccgttctgtacttgtcaggcagctttaaaatctttttctgaattgtgtccgacagctccaatgacaatacggcgtcttcagggagaaccccgtccgcggcgatctgcgaatacatcgtcagcccttctgctcccgctacttctgcgtccagatagtaatcaggctttttcttgcggatgcggtcaatggtcaggttggtcgcaattctgtaaagccacgttgaaaactttctgttgatatcgaaactgtcgatattgacatacgctctgataaaagcttcctgcgcaatatcttccgcttcgtgaacattgccgagcatgcggtagcaaagctggtaaatcttatctttataaaggtcaacgatttctgcaaacgcattttgatcgccttttttgacttgcttgattctttttttaatcaggttttccatgttttatcttacctctgcccttcaccggtctgtatctatacgttgattgttttaaaaggtttcatttttttattacatttattttaccaaatttcaggcagggtgtagatggaaaatacagaatatactgccttaacagcagcttaaaaatagtatatctgatgaacaatcaaaaaccgaaacaaaatgccgataaaaaaagacacctttatgcaaaaggtgtctgagactgggctagctggattcgaaccaacgcatgacggagtcaaagtccgttgccttaccgcttggctatagcccaaaaatggtggaggggggcagattcgaactgccgaaccctgagggagcggatttacagtccgccgcgtttagccacttcgctacccctccgtatttttttggaaaacagtgccggccagaggacttgaacccccaacctactgattacaagtcagttgctctaccaattgagctaggccggcaaatatggtggaggatgacgggctcgaaccgccgaccctctgcttgtaaggcagatgctctcccagctgagctaatcctccatatgacccgtacgggattcgaacccgtgttaccgccgtgaaagggcggtgtcttaaccgcttgaccaacgggccgctgtgtccgcgtcgagctgacaaaagttattatatacaggttgtaccccatttgtaaagagaaaaattattttttttattttcaaacttttttacccgttttttaactgaaaaactcatccctcctctcttatttcatttatgatgaaagtatcaaaatattgaagggaatggacacagatgatcttagtcagctcttgtctcggcggtatcgaatgcagatataacggctctcacgccgcttcggaaaaaatccgcagactcgtagaagaaaagaaagctgttatggtctgccccgaacttttgggcggcttcaccactccccgcgaaccggcggaaatcatcggcggcacgggtgaagacgtgctgaacggaacggcaagaatcgtaacggcatcaggcgaagacgttacagctttatatatggacggcgcggaaaaaacgttagcatacgcaaaagaaataggcgccgcaacggtcatccttaaagaaaacagtccgtcctgcggcagcagctttatctatgacggcactttctcaggaaaaaaaatactcggagacggcatcacttccgctcttttaaaacgggcaggctgccgtgttctatcagaagatgaattggatcaattataaaaaaggagagtagatatcatggatgtagccctgtccttttataaaccggagcatgcagacgggctgaacgggtttgtgctgagtgaagaagataaaaagttcacagctctgccgatagatgtcctgccgcaggcgcttgtcatccgggatcgctacccgacagtcattttaaaagaagaccgccccgtcggtttttttattttacatacctcaaaagaaaccattgctccgtattcgaacaatgtgtctgccattttgctgagtgcgctgtcattacatgcgccgcatcagggaaaaggttatgccaaacaagcgatgctgcagctccccgcttttgtcgcaaattactttccttggtgtgatgaaatcgtgcttgctgtaaaccatcgcaatcaacgtgcaaagaacctgtaccggtcttccggttttattgacaaagggcggcgcaggatcggcccgatcggtgaacagcacattctgcatcattttttgtgaaagcgcttgattattcatctcatccctgccgatttttcttgaaacatctattcagaagcccatatacttcaagtattaacgacttgggagggtacaatcatgacagaccggcttaacattcacagattgaccacagaaaccagaaatccgcagaccgcttcaatccatcaggcagacacaatggaaattctccgcatcattaacgaagaggatttcaaagtggctgaagccgttcagcaggtgctgcccgatattcagattgccgttcaattcgcccatcagtccttacggcgaaacggcaggctgatttatgcgggagcgggcacaagcggcagactcggtgtactggatgcggttgaatgcccgcctacatacagcgtaagtcccgacaccgtcatcggtctgatggccggaggggcagacgcctttttgcaagcggctgaaggtatagaagacagcgaggaaaccggcgctctcgatctcaaaacgatcgggcttaccgcagaagacaccgtgatcgccatcgcggcaagcgggcgcacgccgtatgcggccggtgcgctgaaatatgcaaaaacaatcggcgccaaaaccgtcgcgctcacatgcaataaggactccttgatcagcacctttgccgatcacagcatcgaagtcattgtcggccccgaagtgattacagggtcaacacgaatgaaagccgcgacggcacataaaatgattctgaacatgatttccacggccgtgatgattaaaagcggcaaagtgtacgaaaatttaatggtggacgttcatgtcagcaacgaaaaattgaaagaacgcgcaatcggcattatccaaagcatcacgggcgttccgtacgacaaggcaaaagaaacgcttgaggccgcagacagccatgtcaaaacggcaatcgtcatgctgaagacgaattcggacgaaacacacgcgaaggcactgctcaaagaatcagaaggattcattgataaagccattgaacagcacgtttcaagagaaaaagaacgctgatcgttctttggagaaaaatattgtgcttttacgagcccgcgccgttttcatgttcggcgcaggcgcttttaggacgcgtttcaggcatagctccccgggaaaaatcgtacagaaaaaggaggatctccatgagcaaagaggcattttatcagtcactggccaaagatatcctggacaattgcggcggttcatcgaatatttcaggctttacccactgtatgacacgcctgaggattacacctttagatcgggacaaaacggatattgaggcgctgaaacggcttgacggggtaataggcgtcgtcgaagccgaaacactgcagatcattctcggcacgggtgtcgtcaatcatgtcgccgacgctttcgcaaaacttatgccatccggaaaaaacattgatttaaaagaagccgcctcacggaaaaaagccgatctcaacagaaaaaacaccacacccatcaaattgtttctgagaaaaatatcaagcatcttcattccccttattcctgcactcattgcatcaggtttaatcaccggtattacgaaagccgtcattcaggccggctggctcccgaaagaatcccaaatcgcacttattttaacggttatcggttcaggcttgttcgcttacctcggcgtccttgtcggcatcaatgcggcgaaggaattcggcgggacacccgcgatgggcggccttgcgggcatattgatccttaaccctgagatcgccaatatcagtttgttcggagagaatctgctccctggcaggggaggattaatcggcgttcttttcgctgcggtttttatcgcttataccgaacggtttatcagaaagtacgtccatcaatccatcgacattatcgtcacgcctacattgtctttacttatcaccgggctggtgacatatgtcgtttttatccctgcaggcggttttatttctgatctgattacatcaggtttattgtcgctgctgaatgtcgggggagtgctctcagggtttgtactgggagccgccttcctgcctcttgtcgtcaccggcctgcatcagggcttgactcccgtacatttggaattaatccgatcaatcggagatgacccgcttcttccgattctcgcgatgggaggcgcgggtcaagtaggcgcggccttcgccatctttatgaaaacaaaaaaagcctcattaaaaagagcgatcggcggcggacttccatccggtctgctcggaatcggagagccgcttatcttcggcgtcacgctcccgctcggccggccgtttttgacggcgtgtttaggggcgggaatcggcggcgcctttcaagcccattttcaagtggcgactttttcaatcggtgtctccggccttccgctctcgtttctcgtacagccggctcaaatcgttttgtatatcatcggtctcttcatctcttacgcggcaggctttgtcttcacttatgcgttcggatttaaggatgacatggctgctgaatttgaataaaccgggagggatcagaatatgaaaacactgacagccgccatactcacaatggtcatcagcctctcttttctgccgcagcacaaagccgaagcccaatccaaattatacgacgcagcaaagctcagaaaggttgatcaaatgattgaaaaagacatcgcagcaggattccccggagccgtcctcatcgtcgtaaaggacggacgggtgatcaaaaagaaagcatacggctacagcaaaaaatatgacgggaacacccttttatcccgtccgaaaaaaatgaaaacatcaaccatgtttgatttagcttccaatacaaaaatgtacgcggccaattttgcactacagcgactcgtcagccagggaaagcttgatgtgtatcaaaaagtctcggcttaccttcctgatttcaaagacagaaaaagcgatccgattcaagaaaaagaccgtatacgcgtcatcgatgtgctccagcatcaatccggtctgccggcaagcttttatttctatcagccggacaccgcaggccctttatattcacaagaacgggataaaacaatccgttttctcacccagatcccgcttgaatacaagccgggaacaaaacacgtatacagcgatatcggttacatgattctcggatgcatcattgaaaacataaccggaaaaacccttgatacctatgcggaacaagaactgtacaaaccgctgaaactgacgcacacactgttcaatccgctgcaaaaaggttttaaagaaaaagcattcgcagctactgaacgtttaggcaacacacgtgacggagtcatccatttccctcacatcaggacatatacgctgcagggggaagttcacgatgaaaaagcattttactcaatgggaggggtgtccggtcacgccgggctgttttccagagctgatgatatggccgtccttcttcaagtcatgctgaacagaggcagttataaacacgtttctctcttcaataaaagaacggccgatttgttcacaacggcggcatcctctgatccgactttcgctctcggctggcggaaaaacggcagcccggatatggagtggatgttcggaccttatgcaagcaggcaggcatacggccatacgggatggaccggcaccatcacgattattgatcccgcttataagctggggatcgcacttttgaccaataaaaagcattcccccgtcgtcagccccggtgaaaacccgaatgtttttgaaggggatcttttcccgaccggaagctacggcagcgtcataaaagcgatttatgaagccattgaatgacaacccatgtcttttgtccaaactatgacggcaggagggcaccatcatgaaacttttcatctcagctgtattactgttgttcattgtattcggcacgcatcatgcatcaacaaaaccggacattccgtcacaggcggaacaagcggtatcccgtatgacgttagatgaaaaattagggcagatgctcatgcctgattttcgaaattggcaaaaaaaggggcagtcatcacctgaggctcttacccaaatgaatgacgaagtcgcagggcttattcaaaagtaccggttcggcggcgttatcttatttgcagaaaatgtaaaaaacactgagcaaacggtacgcctgacagatgcctttcaaaaggcgagccctgacattccgctattattaagcattgatcaggagggcggcatcgtaactagacttggtgagggcactcatttcccaggcaatatggcgctcggggctgctagaaaaacagcctacgcgtcccagaccggcgccattatcgggaaagaactgaaagcactgggcattaatacgaatttcgcgcccgttctcgatatcaataataatcccggaaaccctgtcatcggcgtcaggtcgttcagttcagaccgtgatctgacagcttccctcggccttgcctcaatgaaggctcagcaaaagcagaatgtcgctgccgccgtcaaacatttcccgggacacggcgacacggatgtcgacagccactacggtcttccgcttgtcacccacaatcaagaaaggctgcgtcagattgaactttatccgtttcggcaggccattcaggccggagctgatatgatcatgacagctcatgtgcaatttcccgcttttgacgatacaacctataaaagcaagctggacggttcagacatcctcgtacccgccacactctcgaaaaaagtgatgactcatcttctccgtgaggaaatgggatttaacggcgtcatcgttacggatgcattaaatatgaaagccattgccgatcatttcggtcaggaagaggcggtcgtcatggcagtaaaagcaggagtcgatattgccctgatgccggcccaagtgacatcgctgcaaacggaaaaccgctttgcccgggttcattccgcgttaaaaaaggcggtacaaaaaggggatattccgctgcagcaaattaacaaatcagcggaacgcatcatttccctgaaaataaaacgagggatatatcccgcaccgaaagagacaaatctgaaaaagaagattgcaaaagcaaagaaaaccgtcggcagcaaaaatcacctgaaagctgaaaaacaaatcgcggaaagatccgtcaccgtcttacaaaacaaaaaccgcacgctcccattcaaaccgaaaaagaacagccgcgttctcattgccgctccttatgaagatcaaacagcggcaatggaacaaaccattcggcagctcatcaagaagaaaaaaatccggccggtaaccatcagtaaaatgaacttcgccgagcgcacatttcatgatgaacacaaaaagctggtatccgacgcggattacgtgattacaggctcctatgtcgtaaaaaatgaccctgtcgtaaacgacggcgtgattgacgattccgtcacagatcccggcaagtggacgaccgcatttccgcgggccgtcatgaaagccgcacaatcgaaccaaaaaccctttgtgctgatgagcctgcgtaatccttacgacgccgcgaattttgaagaagctgaagcccttatcgcagtctacggctttaaaggatatacagacggacaattcctccagccaaacattccggcaggcattgaagcgatattcggacagacaacaccgcaaggcaggctgcccgctgacattccttcagtcacgcatccgggaacgacactgtatccttatggtttcggtatcaatctgaagaccggaaaaccgctttaaacaggagggctgattatgaaaacacatacggctgcacttctcgccggacttgtcgtcatcagtgctatgacggcagtctcggcggcttctgacagaaaccttcataccgccaagaaaccaagcatccaaacaggcatcgaccgcctgctgaaagattataaacaggaactgaagggaaaaagggtcgggctgatcaccaacccgaccggtgtgaacgcatcattgaaaagcagcgttgacgtgctgtatgaggcgccagacatccgcctgacggcattattcggaccggagcacggtgtccgcggcgatgctcaggccggagacaaagtcacatcctatatagacgaaaaaacagggcttcccgtctacagcctatacggggagacgaggaaaccgacgcctgacatgctgaaagatacagatgtgctgattttcgatattcaggatgtcggaacccggtactacacctacatttatacaatggcctatgccatggaagcggccaaagaaaaaggcattcctttttatgtcttggaccggccgaatccgcaaggcggacgaaatccggacggcccggttcttgaaccggattacgcttcatttgtcggactgtatccgatcccgctgaagcacggcatgacgatcggtgagcttgctcttttattcaataaagagtttcatattggcgctgacctcaccgtcgtaaaaatgaagcgctggaagcggacgatgacgattgaagataccggtctgccgttcgtcctcccttcgcctaatatcccgaccccggacagcatatttgcatattcggcaacaggactaatcgaaggcacaaacgtatccgaaggaaggggcacgacaaagccgtttgaacttatcggcgcgccttatatgaaaagcaccgagctcgaagaacgcctgaacagtctcaagctttcgggcgtcaccttcagagccgcttcattcatccccagcttctccaaacaccagggcaagctgtgccacggcgtacaagtctacgtaacaaacagaaacacatttgaagcggcaaaaacagggctctccattctgaaaaccatgcatgacttatatccgaatgacttttcattcttgccgacaggctcttttgacaagctgatcggtaacggctgggtacgcaaaaaaatagaaaaaggcgcttccattgaagacatcaccggcacatatcaacgccggctggaccaattcaaaactctaagaaaacaatacctcatatactgacaacattcgtgttacacgtgtaacattttgacgcatttcacatttccgctttttataggaaaacattcatttatttggtacaatttaaatgataactgttatcatttaaatgaatgtttcctaaaaggtggtttctcatgaaaaacacattattctttcagcccattgatatcatctccgtgaaaaaaacagccgaccttctgtcagagcatcagctcactgattcccccgtattgatctttcatgtgaaaggcgagggacaaattgatatcggaacagacagctttccgctgcagaaggaaacgctctacatctgtccttgtgatgagacattcaatattgcccctatatcgtcaggcggcatccatttgtatatcgtcagactccgtgttttctcctattcctcagatgatgaagcgatgcttccggataacggggaagacatcttccacggacttcagcaaatgaatttacaaacggttgatcatttgacaagccggcttcaatcactttctgaaaacgtgcgatcggcggatggattgcagaaaatgaaatataccgccgactttcagcagctgatgtacgacctttatgccgcaaaagtatgccatcaaaataatacgaaagcggcgatcgaacagacaaaacaattcatacatgctcagtccgacacaaaaatcacgctcacccagctcgctcatatggcgggaatcagtcccaagcattacagtgaaacctttaaaaaactatacgggcagagcgtaactgaatatatcacagacatccgcataaccaatgcgaaaaaactgatggccaaggcaagctgcaaactgcgggaaatcgctcatcaaatcggctaccaggacgaattttatttcagccgcatctttaaaaaacataccggcagctcacctacaagctacatgaaaaaaaggcgcacaaaaatggccgcgtacggaaaagaaacgatggggcatctgattcctctgcatcacgtgccttacgctgcggcgctgcacccgaaatggacggcctattattacaaacaattctcttccgatattccggtccacctgagcgcttaccgctataatgcaaattgggaagagaacctgcatacgctgtctcaagctgccccggacattattttcagtctcgattctgtcagtgaagaagaaaaacagcgcctgaatgacatcactgaagttttttatcttccggctcaagagaattggagagaccagtttcttcgcacagccgcatatctgaatgaagagcaggaagcgcggcactggcttaaaacttatcaaagtctcacccattcagcgaaagatgctcttaaacatgtgcggcaccagcggttcttatttgtccgtgtatataaagaaaatatgtacatcgcccataacaacagtattgaggaagtcttcttcggtgatttggactttgcctccgcaaaaccggaatcatttgctcctgacgaaaagatttccttggaaatgctggcggattgccaggctgactgcatcatgcttttcacttgtaaagaaccggaaacgcttcgctattttcagcggattcagcagtccgggatatggcagaaccttagtgccgtcagcaataaacgcgtgtttcccatttcatctgacccgtggattgaatattctccaagcggacatcagcggatgatcgagcaaagcatttccattttatccgaagatcgtccatggtaatgccggaaattatccatggtcttatccctattcattctctataattccaattgataatagttatcaattgaacaggaggaacaatagatgaagaaattggcattcgctttcatgattttgcttttggctttcacggccgcggcttgcggaagctcagaaacaactgatacagcaagtaaaggaaaggacgcttcttcagataaaaagaaaatcgaatatctcggaaaaacatatgaagtcaaagcgccgactgacaaaatcgccattacaggcagcgtagaatcaatggaagacgccaaattgcttgacgttcatccggcaggagcaatttctttctccggcaaattcccggaactgtttaaagatattacagataaatccgtatcaacgggggaaaaaatgcagccgaatatggaaaaaattcttgagctgcagccggacgtcattctggcatcaaccaaattcccggaaaaaacgttgaaaaaattgagcggcaccgctgaaacgatccctgtctctcatatctcatcaaactggaaagaaaacatgatgctgctcgcccagcttacagataaagagaaaaaagcgaaaaaaatcatcgcagattacgaacaggacctgaaaaagacaaaaacaaagatcaacagcaaagcgaaacagtcaaacgcgctggtcatcagaatcagacaaggcaatatttatatttatcctgaacaagtttatttcaactccacgctttacggtgatttaggcctgaaggcgccggacgaagtcaaagcggcgaaagcgcaggaactgatttctcttgaaaaattaagcgaaatgaaccctgaccatatcttcgtacaattttctgatgacgaaaacgcagataagcctgacgctttgaaagacttagagaaaaatccgatctggaagagcctgaaggcagtcaaaaaagaccatgtatacgtcaatacgattgatccattagcccaaggcggaaccgcgtggagtaaaatcagcttcttacaggttgcggctgacaaattgactcaagactaataaagagtaggtttttcacatgtatgcaaaacggcggacacacattattatcattgcttcaccgattgctattgttctgtcactgctcctttccgttttatacggcgcaaagcagcttgacatccataccgtgttctccgcattgctgcactttaatccggagaataccgaccatcagatcatatggcattcaagaatcccgagggctgccggtgctatgtttatcggcgccgcccttgctgtttccggagcgctcatgcagggaatcacacggaactatctggcctcgccttcgatcatgggtgtgtcggacggctccgcttttatcatcaccctttgcatggtattgctccctcaatcgacatccattgaaatgatcatctactcgtttatcggttccgcattcggcgccgctcttgttttcgggctggcctccattcttcccggcggttttaccccggtgcagcttgccattatcggaacggtgaccagtatgcttctcagcagtctgtcggctgcgctttcgatttattttcaaatttcgcaggatctcagtttttggtacagtgcgagactgcatcaaatgaaccctgattttttgaaactggccgtcccgttttttgcgatcggaatcattacggccatgattctcagcaaaaaggtcactgccgtatcattaggagacgacatttcaaaaagtctgggacagcagaaaagaaccatcaaactcatggcgatggcggctgttgtcatattgaccggaagctcggtggcgctcgccggaaaaattgcctttgtcggtttagtcgttccgcacatcacacgttttctcgtcggatcggactacagcaggctgatcccatgcgcgtgcattatcggcggcgtctttctgaccctttgcgaccttgcgagccgattcatcaattatccgtttgaaacgcctattgaagttgtcacttctatcatcggtgttcctttctttctttatttgattaaaagaaaaggaggggatcagcgtggtgcgtaaaatggcaggaatttatatcattctgattgctctcatattgctcgtaagctatttcagcatgacaagcggttctttttccgcaaagccgggtgaactgctcagtacgcttttccgcatccatccgaatccgcaatatgacattttgctgtttcagctgaggctgccgcgcatagtcatggctgctgccatcggactcggattggggatagccggagctgttattcaggccattaccaaaaacggtcttgccgatcccggtattttgggcattaatgcaggagccggagcgggaatcgtcacgtttatgcttctgtttcagggacaatctgaagcgacggcacttgcctctgcgatgggtatgcctgtcttcggcctcatcggaggactgatggcggccgtgctgatctatattttcgcctggcaccgggggcatctggaatcgggcagaattattctcgtcgggatcgccatgaattccggattcagcgcgctgtctttatttctatcattaaaaatggacccgcaggattatgagatggcgatggtttggaaaaacggcagcatctggtcggcaaactggatgaccattacggcaatccttccgtggctgatcttgttcattcctcttcttatggcgaaaacgtcattgcttgataccattcgtttcgatgaggacacggtgaaaagcctcggtgtttcaaccaataaagaaaaaaccattttgctcattgcctgcatcgctttgatcagcgcatgtgtaaccgcagcgggcagcatggcatttgtcggactgatcgcgccccatatttcccgcaggctcgccgggattgagcacagatactcattaccggtcagcggactggtcggtatgctcctcgtcatatccgccgactttgcgggcaaattgttctttcagccttcagaagtgccggcgggaattatccttgcaattctcggcgttccttatttcttttttcttctgtttaagcaaaaaaaggggatggacgcatgagaggcacccttacagaacacccgataaacggaagggaatgcactgtgtatcttcctccttcctattcggttcaaacaggggctttaccctgtgtgtacgtacttgacgggggttctttgtttttagaacagatagataagcttgaatcccaatttacgaacggaacacttcccgaattgattttcatcggcatcaaaccggctgacagactcgatgagtacacaccgtggcccgcgccttccctgagccctgcgtttcatgatttcggcggcaaagggaggctctttctcgaggagctgacaaatgtcattattcccactgttgaagatacgcatcacatttctgcgcatccggaaacgagaggactgatcggtgcgtcattaggcggactgttttcgatatacgcgatgctgcaaaagcctgaaatattcggcagaatcggctgtatttccggttccttctggtatgaaaaatcagcagattatgtccgctccgcacctttgcggccggcacggcagcgtatctttatgtctgtcggcagccgtgaagcagagcaaaaatgtaacatccaaaacaccatgatcggacaaaataaagacgtgtacaaaagcctgaggcaaaaaggcttttctcaatctcagctctcattcacgatcgaagagggcgccgtgcaccatcaagaagcgttcaaacgacaatttaattcagcactaagctggctgtacggaaaaaaccgctcacgtgactgagcggtttttttcatacttgatcacgaccggcttaagctcaaagcgtctcagcaaatagccgaacaaagcggcaaggatttgctgaaagagcatcccgatgacgaccggaaccgccacttgagacggaaagaaagacacggcgagaacggctccggcgctgatattgcgcatgccccccgtataaatcagagacacgatttcatcctggctccgcttcatcagtcttccgatcagccaagccacggcataacccgtcatggcaataaaaaataccgtgcctgcgatgcccgcaaatttgatatccacgtgcgtgacatacggcgcgatttccgaactgttaatggcaatgacaatcatcagacagatttttgaaaaaggagacagtgaccggcttatcgcctgagtccttaccggcggggaaaactggttgaccatcatccctgcgatggacggaatcaccaccatctccgccagccctttcatcatgccccacacatccatctgaacattcgccccggccaggacagacaggcttaatggtacgataaaaggagaaagtacggtatcaaccaggataatagacagcgtcaatccgacatttcccttatacatcgcagcccaaatcaaactcgtaattccggtcggaatcaccacacccataatcagccccgtcacagttaaagggtcaccgctgaaaatcagatggccgcttccccatgcaaaaacaggcatgaaaatatgcagaacaaacaatgccatgatcatcgggagcggcttctcgatactgcgcttcagcgattgaaaattggcactcagactgcccgtaaatgtaataaatgcaaatatccacggcacagcgccggccatccagctgatatgctgagataacagcacacccgccgccacactagacggagtcaaaagcggcatgattctccccaacacttggttcaacttctgaagccacatcatatgcaagtctcctatatacggttttcaagtctcattcattataacaatgcacaccggcaaatttaaccgaaaaaaagcccggatatattcatccggacttcacaaattctatgccatttgtttcattaaatctcggcttttctgatttaatccctttaattcagcctcaattccgtattctttacatttggcgacaatcttctcaagagcagccgctccagaatcatcccacacgtgggcatcagtcaaatcgatgataatccgtttcacgtcttcatcataaacgatggcattcatcagttcagacacggaagcaaaaaagatctgtcccgttaccttataagttctgacatctttctgttcggaatgtgacacaatcttcagcttagaaattttcgccgtaaaaaagatcgcgcttagcagcacacccgcgaaaacacccttcgataaatcatttgtcagaacgaccgtcacgacggtaatcaccataacgatcgaatcagtaaggggcgctttccgcaaacctttaatcgatgaccagtcgaacgtgccgatggacaccataaccatcacggccacaagcgcagccatcggaattttcacgacgataccgcttaatacggcaattaaaaacattaaaaacgctccggccgtaaaagccgacaaccggccgcgaccgccggctttcgtattaatgacagactggccgatcatggcgcatccggccatgcctccgaaaaacccgttcacaatattggcgatgccttgtccgcggctttctttgttcttatcactatccgtatccgtcatttcgtcaatgatctgggccgtcagcaatgactcaagcaatccgacgaatgcaagcgccagtgaatacgggaaaataatccgcaatgtctcaaacgtccacggaacatccggtatcaagaaatgcggaagtgaacttgtaatcccgcccatatcaccgaccgtgcggacatccgcatggaagaccaccgcaatgatcgtcatgacaataatcgccaccagcggagacggcacagccgtcgtaaccttcggcaaaagatatatgatagccagtgatccgacaagcatggcgtacatgacccatgaagctcctttgaactgcggcagctgcgcagaaaaaatcaagatcgccaaagcattcacaaatccgatcatgaccgaacgcggaataaatttcatcaatttcgctatcttactgacaccaagaataaattgaataatacctgtcaaaatggttgccgcaaacaaatactgcagcccgtaatcagccaccaatgtcaccatgacaaccgccattgaacccgtagcggctgaaatcattcccggtctgccgccgaagatagaaataataatcgcgatacaaaatgatgcataaagcccgaccatcggatcaacacctgcaataattgaaaatccgatcgcctcagggatcagagcgagagcaaccagaataccggccagaatgtctttacggacattcccgaaccattgctgctgtaacgtataatctttcaaatgataacgactccttttcactataaaaatccgcaccttatcagttggaaacattgatttttatctggggaatatgaggcaagcttacggggaaaaggggacacgctcagagtataatgtcttgaggaaaggaatggttaacaaagagtatcatattaaactttaaagaaatgtgcaagaccgtataaaaaagaaaagaaaacggctctcactggagccgtttccgcttttataaaagttccggatcagacacaagaatcgtttttattgcgctgatatcctttctttcttttgtcaccgggtcgatgcccatgagatgatcaatggcttcttcataattcttcagttccgtcttttccgtaataaaatcatagagctgcggaaggtcggatgcacatgctaacgcagcctccatgatctgacgggcttcacctgtgcccacaatcgttacgccgtttgacagcagctgatacggcctgactgtcatctcatacgtatcatcaaagcccatcggcacgattctgcctcccttttcaataaaaggataagcccaatcaagctgattgccgatcgcgtcaaaaattacatcaaattttcttccttgattaatccgtttcacttcatccacggttaatgcttcagggtggtagacataatccgatatccggctcgccgcctcgcttcggaaactgcctatttcagtcgcaaccgtcaatcgcgccagttttttcaccatcatttgcacaagcagtccgattggccccgaccccaaaaccaagaccgagtcctccggctgaatcgaagctttgtccacaacattcagcacacaggagagaggctcaaccaatgtggcccgctcccattccattgaatcgggaattctgtacatgaacctgtcttctccgacgtaatattccgcaaacgttccgtgcgccccgattccgagctgccaatcctcgaaggtttcgcaataacacgtcagccctctccggcaataatgacatttcccgcaaaactgcgtaggatctatcacgacgcggtctccgacttttacatttgtcacgtccggtccgatttccacgaccgctcccaccgattcatgccccataatcatatgatgggttgcattcatttttcctttcagcacatttaaatccgttccgcagataccggtgccgaaaattttcactttcacatcattggatttccgaatttgaggctcgtccacctcttgatattcaagcttatcattaggagtccagaccaacgccttcatatttctcttcctttctgccccagcggatttggtctaacaatgtttgatgaagctccttcgttgatgccgcaatacatgattgctggttctgataacttaaatctgtcagaagcgtttcgtccaaagaccggccgtatgcatccgtaatgaccactcctgctttcttcgccaaaaagacgcttgcggcaatatcataaggaaacaaatgcagcacctctccgtttccgacctgctgaaaatctgaaagcagcttcggatcatctttcagcagacgattgccgatatccacataagcatccatctgccccgtgataattcgtgaaatcgaataagaagcgctgttgaaaacaaaaaccccgccattattggctgaccggtcaatcagatgaccgtatgcatccgtcatcagctgtgccggatgcccgttaaactcaaggctccaaaacatatttttaatatcccgcacttcgctcaaattcggcaattctccctgatacccctcaaactgaatggcgtcgctgtaaatatcaccgtacatgtaagcgcccgatttcaattcaagcaaaaaagcaaattcgatatccttaatctttgcgtttggcttatacgaagcaagcgcaatcgaaatacacgacatttcaagccccgcggcggccggacgcgttccgtctatcggatctacaattaaaatatattgcggatcttctccaatcagcttcaggccgccatcctccgtgtaaaaagcaaccggatggcccttatcttgaatataatccagcaccgcctcctcagcagcggcgtctatgttaaattgggcgtcgcctcccggagaatagccgtttacgagccggtttttcagcgtgcctttttgacttttcaccttatgataaacaaattgtccaagcccgatgatatagtctctcacttgatttcctccaatagcttgcgaagtctgtagcagagcacttctgcttcactaagtgtaatagttaaaggcggtcggattttaaaaacatttccgaacccgtaacgggatgtccggagaatcagcccgtaatccattgcccgttttgcaatataattggtcagctccacatccggttcattgttctcttttacaatctccacaccgatcataagaccgacgcctcttacctcagaaataaaagcgaaatcctctttcatcgtttctaagcgatccataatataatgaccgaccgtcgttacattttccaaaaatcccggacgctgcatgatatctatggttttacacgcggcagcggcggccatcacatttgagccgtacgtgaaggagtgcgtataccccggaagcccggtatacttgtcctccgtcagagtggcggcgacttggaagcctgtgcccccgagcccttttgctaccgtcatcatattaggtttcacatcgaagtggtccgcggcaaacattttgcccgtccgtccgaacccggtctgaatttcatcaaaaatcagggcgatatcgtgttcatcacaaagctgtctcagctgtttaaaatactctttaggcggaacgacgtttccaccgtttccggatatcggttcaataatcatggcggcaatttttccattgctcgcatactcaataaaatcattaattctttctacgcacagcataccgcatgaatcaggtttctgattataaaaacagcggctgcaatacggatcggggacttgaaggccaaaagaaatttgcggcgggaaaggttcttttctgaatgagttgccggacaaagcggaagtcatatacgtttgtccgaggtggcttcgaaataaggagatgacatcggtttttccggagtaatactgagccattttaatagctccttcatttgcaccggaaccgctgctgactttagggtgtacttttgtgagattatcgggggcgatttctactagtttttctgccagtttatttacggcgtctgtttgaaaagatgatgtcacatggatcagcttatcggcttgttctttaaccgtatcaatgacttctttgttaccgtatcctaaattcaagttaaatgtggcagaagcgcaatcaatgtactcattcccctcttgatcgtacaggtaaatcccttctccgcgctccattactacatcgtcaacactgtaatacaagctgtctggattcgtgatttccttcgttcccacaaataccacccctatgaaattattagaatttcgctttttatcgtattaattattgaaaatattgtcaacgatctttcttgtaaaaaatgttaacaatttgttaacgttaccataagggatgtacgagaaaaagttatgtgatatagtaacaatacttggattttttgtaaaaacgtcatgtcatacgagtagagagaaatattattttacgaataaggagataaaatgatgaaatctcgtctgctgtggataagctgtttttcttatggatcgattgcttttacacttgttattctgggagccgtactgcctgagttactcacacattattcacaaagctacagtaatggcggtgtattggtattctctcagttcatgggctttctcatcggtgttattggcatgccatacatggtgaaaaagcttgggcgcaaaaacgtcgttatctttggcctggcactcatcagctgcgaaatgttcatcaccttcctgccgccctggccgctgctctttcttctcgtcagcatcgcggggcttggcgccggattggtggaatcctgtgtaggcacgatcatcctcaccgctattaaagaaagacaggctgtggccatgagcaagatggaagtggcctacggattaggcgcgcttttcatgcctctgctctcaggctttcttatcaacaaccacatgtggacaattgcttttttagtattagggttatccagttttgcacttttaatcgcatggaagcagatgagtttcggcagtattgatcagcttctcatccgaaaagaggtctcttccgatgacactaaaaaagaaagcaccggttatcggtcacacggattgctgtttattgccttggcgggggcttacttcttcttttacggaggcagtgaagtttcaattgtacattttatcccctccattttctctgagaaatgggatatccccaactctttggcaacgataacagttacagtgtattggacggggatgatcatcggaaggttactaacaggcccggtatcagaaaagctgacatatcaccgttatcttcgtctcataagcattggcggtctggcagcacttaccgtattagcactaagtaaaaacgtatggttcggctttgccctttgcttctttttagggctgttcatggcaggcatgtttgcaatagccctaatcatcacgaatcatttttatcccggaaagacagaaacgactaccagtattctgctcgcttcaaacggattaggaggttcactccttccgatcgccgtcggctggagcttagatgaatatcccgcacaaactgcgttctggctgtttactgcactgatggtccttatgctgctgattgtgttcagtttaagaatactcgagacaataaaatcaaacaatcttcaaaatcacaacagcaaagcaaaatcaatgtaaacaaaaaagctaatgcctttgaaaggcattagctttatatatctatgtgatctttcaaataaaaaaaccagttcatcatgaactggtttaagacagcttggcggcgtcctactctcacagggggaaacccccgactaccatcggcgctgaagagcttaacttccgtgttcggcatgggaacgggtgtgacctcttcgctatcgccaccaaaccattgagagtgttctctcaaaactagataacagtaagcatacattcaaattggttaagtcctcgatcgattagtatctgtcagctccatgtgtcgccacacttccacctcagacctatcaacctgatcatctttcagggatcttacttccttgcggaatgggaaatctcatcttgaggggggcttcatgcttagatgctttcagcacttatcccgtccgcacatagctacccagcgatgcccttggcagaacaactggtacaccagcggtgcgtccatcccggtcctctcgtactaaggacagctcctctcaaatttcctgcgcccgcgacggatagggaccgaactgtctcacgacgttctgaacccagctcgcgtaccgctttaatgggcgaacagcccaacccttgggaccgactacagccccaggatgcgatgagccgacatcgaggtgccaaacctccccgtcgatgtggactcttgggggagataagcctgttatccccggggtagcttttatccgttgagcgatggcccttccatgcggaaccaccggatcactaagcccgactttcgtccctgctcgacttgtaggtctcgcagtcaagctcccttgtgcctttacactctgcgaatgatttccaaccattctgagggaacctttgggcgcctccgttaccttttaggaggcgaccgccccagtcaaactgcccacctgacactgtctccccgcccgataagggcggcgggttagaaggtcaatacagccagggtagtatcccaccgatgcctccaccgaagctggcgctccggtttccaaggctcctacctatcctgtacaagctgtaccaacattcaatatcaggctgcagtaaagctccacggggtctttccgtcctgtcgcgggtaacctgcatcttcacaggtactataatttcaccgagtctctcgttgagacagtgcccagatcgttgcgcctttcgtgcgggtcggaacttacccgacaaggaatttcgctaccttaggaccgttatagttacggccgccgtttactggggcttcaattcgcaccttcgcttacgctaagcgctcctcttaaccttccagcaccgggcaggcgtcagcccctatacttcgccttacggcttcgcagagacctgtgtttttgctaaacagtcgcctgggcctattcactgcggctctctcgggcttgcaccctaacagagcaccccttctcccgaagttacggggtcattttgccgagttccttaacgagagttctctcgatcaccttaggattctctcctcgcctacctgtgtcggtttgcggtacgggcacctctcacctcgctagaggcttttcttggcagtgtggaatcaggaacttcgctactataattcgctcgccatcacagctcagccttcacgggaaacggatttgcctatttcccagcctaactgcttggacgcggatatccaataccgcgcttaccctatcctcctgcgtccccccattgctcaaatggtgaggaggtggtacaggaatatcaacctgttatccatcgcctacgcctttcggcctcggcttaggtcccgactaaccctgagcggacgagccttcctcaggaaaccttaggcattcggtggaggggattctcacccctctttcgctactcataccggcattctcacttctaagcgctccacaagtccttccggtcttgcttcacagcccttagaacgctctcctaccactgttcgaagaacagtccgcagcttcggtgatacgtttagccccggtacattttcggcgcagagtcactcgaccagtgagctattacgcactctttaaatggtggctgcttctaagccaacatcctggttgtctaagcaactccacatccttttccacttaacgtatactttgggaccttagctggcggtctgggctgtttccctttcgactacggatcttatcactcgcagtctgactcccaaggataagtcatcggcattcggagtttgactgaattcggtaacccggtaggggcccctagtccaatcagtgctctacctccgagactcttaccttgaggctagccctaaagctatttcggagagaaccagctatctccaggttcgattggcatttcacccctacccacacctcatccccgcacttttcaacgtgcgtgggttcgggcctccattcagtgttacctgaacttcaccctggacatgggtagatcacctggtttcgggtctacgaccacgtactcaattcgccctattcagactcgctttcgctgcggctccgcatcttctgcttaaccttgcacgggatcgtaactcgccggttcattctacaaaaggcacgccatcacccgttaacgggctctgactacttgtaggcacacggtttcaggatctctttcactccccttccggggtgcttttcacctttccctcacggtactggttcactatcggtcactagggagtatttagccttgggagatggtcctcccggattccgacggaatttcacgtgttccgccgtactcaggatccactcaggagagaacgaagttttgactacagggctgttacctcctatggcgggcctttccagacctcttcatctacctcgttcctttgtaactccgtacagagtgtcctacaaccccaagaggcaagcctcttggtttgggctggtcccgtttcgctcgccgctactcagggaatcgcatttgctttctcttcctccgggtacttagatgtttcagttccccgggtctgccttctcatatcctatgtattcagatatggataccactccattacgagtggtgggtttccccattcggaaatctccggatcaaagcttgcttacagctccccgaagcatatcggtgttcgtcccgtccttcatcggctcctagtgccaaggcatccaccgtgcgccctttctaacttaaccgttaaaaagaatcactacgtgatatcttgcattactaattgaatgtgaattacttctgttatctagttttcaaagaacaacatctcgaagaatcgaatgatccttcaaaactaaacaagacagggaacgttctgtttataagacccgaggtcttatattccgttaaaatccttagaaaggaggtgatccagccgcaccttccgatacggctaccttgttacgacttcaccccaatcatctgtcccaccttcggcggctggctcctaaaaggttacctcaccgacttcgggtgttacaaactctcgtggtgtgacgggcggtgtgtacaaggcccgggaacgtattcaccgcggcatgctgatccgcgattactagcgattccagcttcacgcagtcgagttgcagactgcgatccgaactgagaacagatttgtgggattggcttaacctcgcggtttcgctgccctttgttctgtccattgtagcacgtgtgtagcccaggtcataaggggcatgatgatttgacgtcatccccaccttcctccggtttgtcaccggcagtcaccttagagtgcccaactgaatgctggcaactaagatcaagggttgcgctcgttgcgggacttaacccaacatctcacgacacgagctgacgacaaccatgcaccacctgtcactctgcccccgaaggggacgtcctatctctaggattgtcagaggatgtcaagacctggtaaggttcttcgcgttgcttcgaattaaaccacatgctccaccgcttgtgcgggcccccgtcaattcctttgagtttcagtcttgcgaccgtactccccaggcggagtgcttaatgcgttagctgcagcactaaggggcggaaaccccctaacacttagcactcatcgtttacggcgtggactaccagggtatctaatcctgttcgctccccacgctttcgctcctcagcgtcagttacagaccagagagtcgccttcgccactggtgttcctccacatctctacgcatttcaccgctacacgtggaattccactctcctcttctgcactcaagttccccagtttccaatgaccctccccggttgagccgggggctttcacatcagacttaagaaaccgcctgcgagccctttacgcccaataattccggacaacgcttgccacctacgtattaccgcggctgctggcacgtagttagccgtggctttctggttaggtaccgtcaaggtgccgccctatttgaacggcacttgttcttccctaacaacagagctttacgatccgaaaaccttcatcactcacgcggcgttgctccgtcagactttcgtccattgcggaagattccctactgctgcctcccgtaggagtctgggccgtgtctcagtcccagtgtggccgatcaccctctcaggtcggctacgcatcgtcgccttggtgagccgttacctcaccaactagctaatgcgccgcgggtccatctgtaagtggtagccgaagccaccttttatgtctgaaccatgcggttcagacaaccatccggtattagccccggtttcccggagttatcccagtcttacaggcaggttacccacgtgttactcacccgtccgccgctaacatcagggagcaagctcccatctgtccgctcgacttgcatgtattaggcacgccgccagcgttcgtcctgagccaggatcaaactctccgataaagtagtttgactgactacgcacatcgctgtgcgatttatttaaaactttgaattaacaggtacgttttgtcttgtttagttttcaaagatcattaccgcttgttgaagcagctttattatcttaccactcagcttcttttatgtcaacaactttttttaagttgtttccgaagctttttgttgttgtctgctgtccatcagcgacgtttaataatataccacggtgcttctctataaatcaagcattttttttaaaaagagaaaaaaagaaaaccagtatattatctttaaagcttgagaatggtcgggaagacaggattcgaacctgcgaccccatggtcccaaaccatgtgctctaccaagctgagctacttcccgattttaaaaaatattatggcgcgcccgagaggagtcgaacccctaaccttttgatccgtagtcaaacgctctatccaattgagctacgggcgcaatcaatttcacaatatcccgttgggataaaatggagcggaagacgggattcgaacccgcgacccccaccttggcaaggtgatgttctaccactgaactacttccgcaagtaaaagtgtaatacatggccagaatacagcttcagatagcggtaaaccgtattgttatttatactgttcattatgacaaaagtaattatatcaaggttttgataaaagtcaatatcgtttaacaattaattatgttaatctcttttgcatccttgaagaaaggcttcatcaggagacgcgctaaatacctacaccttaactggtacaatcagcaacaggtttttactgaactaaacaaaaaataacagttccataacattcggaaactgcttcagatcaacgtattttagataagcttccaagcgggctcgaaccgctgacctcttccttaccatggaagtgctctacctgctgagctatggaagcaatggctccgcaggtaggactcgaacctacgaccgatcggttaacagccgatagctctaccactgagctactgcggaatattataagcttcataaacaaaaacatggtagataaaataaaaagcttggcggcgtcctactctcacagggggaaacccccgactaccatcggcgctgaagagcttaacttccgtgttcggcatgggaacgggtgtgacctcttcgctatcgccaccaaaccattgagagtgttctctcaaaactagataacagtaagcatacattcaaattggttaagtcctcgatcgattagtatctgtcagctccatgtgtcgccacacttccacctcagacctatcaacctgatcatctttcagggatcttacttccttgcggaatgggaaatctcatcttgaggggggcttcatgcttagatgctttcagcacttatcccgtccgcacatagctacccagcgatgcccttggcagaacaactggtacaccagcggtgcgtccatcccggtcctctcgtactaaggacagctcctctcaaatttcctgcgcccgcgacggatagggaccgaactgtctcacgacgttctgaacccagctcgcgtaccgctttaatgggcgaacagcccaacccttgggaccgactacagccccaggatgcgatgagccgacatcgaggtgccaaacctccccgtcgatgtggactcttgggggagataagcctgttatccccggggtagcttttatccgttgagcgatggcccttccatgcggaaccaccggatcactaagcccgactttcgtccctgctcgacttgtaggtctcgcagtcaagctcccttgtgcctttacactctgcgaatgatttccaaccattctgagggaacctttgggcgcctccgttaccttttaggaggcgaccgccccagtcaaactgcccacctgacactgtctccccgcccgataagggcggcgggttagaaggtcaatacagccagggtagtatcccaccgatgcctccaccgaagctggcgctccggtttccaaggctcctacctatcctgtacaagctgtaccaacattcaatatcaggctgcagtaaagctccacggggtctttccgtcctgtcgcgggtaacctgcatcttcacaggtactataatttcaccgagtctctcgttgagacagtgcccagatcgttgcgcctttcgtgcgggtcggaacttacccgacaaggaatttcgctaccttaggaccgttatagttacggccgccgtttactggggcttcaattcgcaccttcgcttacgctaagcgctcctcttaaccttccagcaccgggcaggcgtcagcccctatacttcgccttacggcttcgcagagacctgtgtttttgctaaacagtcgcctgggcctattcactgcggctctctcgggcttgcaccctaacagagcaccccttctcccgaagttacggggtcattttgccgagttccttaacgagagttctctcgatcaccttaggattctctcctcgcctacctgtgtcggtttgcggtacgggcacctctcacctcgctagaggcttttcttggcagtgtggaatcaggaacttcgctactataattcgctcgccatcacagctcagccttcacgggaaacggatttgcctatttcccagcctaactgcttggacgcggatatccaataccgcgcttaccctatcctcctgcgtccccccattgctcaaatggtgaggaggtggtacaggaatatcaacctgttatccatcgcctacgcctttcggcctcggcttaggtcccgactaaccctgagcggacgagccttcctcaggaaaccttaggcattcggtggaggggattctcacccctctttcgctactcataccggcattctcacttctaagcgctccacaagtccttccggtcttgcttcacagcccttagaacgctctcctaccactgttcgaagaacagtccgcagcttcggtgatacgtttagccccggtacattttcggcgcagagtcactcgaccagtgagctattacgcactctttaaatggtggctgcttctaagccaacatcctggttgtctaagcaactccacatccttttccacttaacgtatactttgggaccttagctggcggtctgggctgtttccctttcgactacggatcttatcactcgcagtctgactcccaaggataagtcatcggcattcggagtttgactgaattcggtaacccggtaggggcccctagtccaatcagtgctctacctccgagactcttaccttgaggctagccctaaagctatttcggagagaaccagctatctccaggttcgattggcatttcacccctacccacacctcatccccgcacttttcaacgtgcgtgggttcgggcctccattcagtgttacctgaacttcaccctggacatgggtagatcacctggtttcgggtctacgaccacgtactcaattcgccctattcagactcgctttcgctgcggctccgcatcttctgcttaaccttgcacgggatcgtaactcgccggttcattctacaaaaggcacgccatcacccgttaacgggctctgactacttgtaggcacacggtttcaggatctctttcactccccttccggggtgcttttcacctttccctcacggtactggttcactatcggtcactagggagtatttagccttgggagatggtcctcccggattccgacggaatttcacgtgttccgccgtactcaggatccactcaggagagaacgaagttttgactacagggctgttacctcctatggcgggcctttccagacctcttcatctacctcgttcctttgtaactccgtacagagtgtcctacaaccccaagaggcaagcctcttggtttgggctggtcccgtttcgctcgccgctactcagggaatcgcatttgctttctcttcctccgggtacttagatgtttcagttccccgggtctgccttctcatatcctatgtattcagatatggataccactccattacgagtggtgggtttccccattcggaaatctccggatcaaagcttgcttacagctccccgaagcatatcggtgttcgtcccgtccttcatcggctcctagtgccaaggcatccaccgtgcgccctttctaacttaaccgttaaaaagaatcactacgtgatatcttgcattactaattgaatgtgaattacttctgttatctagttttcaaagaacaacatctcgaagaatcgaatgatccttcaaaactaaacaagacagggaacgttctgtttataagacccgaggtcttatattccgttaaaatccttagaaaggaggtgatccagccgcaccttccgatacggctaccttgttacgacttcaccccaatcatctgtcccaccttcggcggctggctcctaaaaggttacctcaccgacttcgggtgttacaaactctcgtggtgtgacgggcggtgtgtacaaggcccgggaacgtattcaccgcggcatgctgatccgcgattactagcgattccagcttcacgcagtcgagttgcagactgcgatccgaactgagaacagatttgtgggattggcttaacctcgcggtttcgctgccctttgttctgtccattgtagcacgtgtgtagcccaggtcataaggggcatgatgatttgacgtcatccccaccttcctccggtttgtcaccggcagtcaccttagagtgcccaactgaatgctggcaactaagatcaagggttgcgctcgttgcgggacttaacccaacatctcacgacacgagctgacgacaaccatgcaccacctgtcactctgcccccgaaggggacgtcctatctctaggattgtcagaggatgtcaagacctggtaaggttcttcgcgttgcttcgaattaaaccacatgctccaccgcttgtgcgggcccccgtcaattcctttgagtttcagtcttgcgaccgtactccccaggcggagtgcttaatgcgttagctgcagcactaaggggcggaaaccccctaacacttagcactcatcgtttacggcgtggactaccagggtatctaatcctgttcgctccccacgctttcgctcctcagcgtcagttacagaccagagagtcgccttcgccactggtgttcctccacatctctacgcatttcaccgctacacgtggaattccactctcctcttctgcactcaagttccccagtttccaatgaccctccccggttgagccgggggctttcacatcagacttaagaaaccgcctgcgagccctttacgcccaataattccggacaacgcttgccacctacgtattaccgcggctgctggcacgtagttagccgtggctttctggttaggtaccgtcaaggtgccgccctatttgaacggcacttgttcttccctaacaacagagctttacgatccgaaaaccttcatcactcacgcggcgttgctccgtcagactttcgtccattgcggaagattccctactgctgcctcccgtaggagtctgggccgtgtctcagtcccagtgtggccgatcaccctctcaggtcggctacgcatcgtcgccttggtgagccgttacctcaccaactagctaatgcgccgcgggtccatctgtaagtggtagccgaagccaccttttatgtctgaaccatgcggttcagacaaccatccggtattagccccggtttcccggagttatcccagtcttacaggcaggttacccacgtgttactcacccgtccgccgctaacatcagggagcaagctcccatctgtccgctcgacttgcatgtattaggcacgccgccagcgttcgtcctgagccaggatcaaactctccgataaagtagtttgactgactacgcacatcgctgtgcgatttatttaaaactttgaattaacaggtacgttttgtcttgtttagttttcaaagatcattaccgcttgttgaagcagctttattatcttaccactcagcttcttttatgtcaacaactttttttaagttgtttccgaagctttttgttgttgtctgctgtccatcagcgacgtttaataatataccatgcatcggctgaatttagcaagtatttttttcgtttttttttgaaacgtatttcgttatattcatctccgccgcggcatacgatgtaatcaagcatggacaagataaggaggcgtcaccagtgaaccacttctacgtgtggcacatcagaaggataaaacagctgcttattattatcattgccgcatttgcagcagccagctttttttatatacagagagccgtcccccttcctgtatttttaactgatagcggcccgaaggctatttcaaaaggggagacgaaagcgggcgaagtcgcattaacattcgatatcagctggggcgatgaaaaagcggttccgattctgaacgcgctaaaagcaaacggtattaaaaacgccactttttttctgtcagcttcttgggcggaacggcacccggacacagttgaacgtatggtaaaagacggacatcaaatcggcagcatgggatatgcgtataagaattataccaacctagaggacaacgaaataaaaaaagatatccttcgggcccagaccgcatttaaaaagctgggtgtgaagaatgttcatttactccgcccgccgaccggacaatttaataaaaaggttcttgccattgcacagcagtaccgctattcagtggttcattacagcgttaactcgcaggattggacaaatcccggtcctgataaaatcattgaaaatgtaaacagtcatataaaaggcggcgacattgtcctgctgcacgcctctgattcagcaacacagaccgaagaagcgctccccgccatcattcacaatttaaagcaaaaaggactgaaaaacgtgacagtcggcgacctgatcgcaaatactgacgtcaagtcatcagaagtgaaataactacctctgggcaaacttcggcagcattaacagctgaaacgcattgcagcccatcagcggaatcagcatcaaataaagccagtcctcattattcactcttagcgcaggaacccattcaagcgctgtaataacgaccattaaaaataatgatgaaacgaacgtattttttgaggactgcttttgttttatatacgccgtcagcaagccgacggcaagcagagccagcggcagccagacaaaccccgcaatcgagtcatcccgctcaccgaaaaacaaaaatctgacgtacattaaatcaaaagcgacaaacagaatgataaacagctgaagcagattccaaagcgagtttgatctgaggatttcaagggcaaaccggtgcaccgtcagaaagacgaagaatcccatctggctgatcacactgaaaatcatgcctaccccgataaaccagatcagaacggagaaaatttgaccggcctcaaaattcagaaagaaccccttgtactccccccacttcagtgcaaatcccacgacgcttgtaataagagcgcccacagctaaaatcgaaaagaaaaatcgaacaagcccgcggcttttcatctcttattcatccccctgacaatcgcgttcagcgatattttgttatgtataaatccattccgatgaatcatattaaaaataagtacaagtaaggaaggagcttatgcatgtcaaaagccaaaacgctattgataagctgttttgttgtattatctgtaacagcttgtgctccaaaagaccaagcagcggatatggattatgaccagactaaaaaaatggttgttgatatattaaagacagatgatggaaaaaaagcaattaaggaaatattaaatgatgatgcgatgaatgaggcattggtgattgatcaaaatgccattaaaggcacaatagagaaaaccctcacctctaaaaaaggggcggagttctggaaaaccatctttgaagactcaaagttcgccgagagctttgcaaaaacgcttcagcccgagcacgaaaaaatcataaaaaaattgatgaaagaccctgattatcagaaaagttttatgcagatcatgcaggaccccggcatggataaaaaatactatgagctggtgaaaagccaaaagttccgcagttacttagaagatgtaattacagagacactttccagcccgcttttcaaaaagcaattcgaggatgaattgaaaaaagcggcttcaagttctgaaaaagaaagccaataaaaggccgggccgtgttgatcccggccccttttttattcagctgttttttcaatgactttttgggcgatacccatataaatttccccgatcggatgacttctgtcatagacagaaggcgcaaactggtccttgtcccaatcaggctgttttaaaggaattctgccaagcagcggcacctgcaattcctctgcaagcttatctcccccgccttgaccgaacacatattctctctcgccggtttttgcactttcataataagccatattttcaatgacccctacaacttcatgatcggtcttaatcgccatagatcccgctctcgccgctacaaatgcggctgtagggtgcggcgttgatacgataatctctttgcagctcggaagcatcgtgtgtacatcgagcgccacatcacccgtgccgggcggcaggtcgagaacgatatagtcaacctctccccagtcaacctcatggaagaagttattcagcatcttgcccagcatcggccctctccacacaaccggagcgttttcttcgacgaaaaagcccatcgacataacctttactccaaatctttcgacaggaagcagtttttctccttcaactgtcgggcgaactgtaatacccatcatgtccggcacgctgaatccgtatatatccgcgtcgatcaagccgactttttttccgagccgcgcaagagaaatggccaggttgacggaaaccgttgatttgccgacaccgccttttccgcttgccaccgcaagaaagaccggcggatgtttcctattcagcagggtttcgctttcagcagcaggccggctgaatttcgccaatgtttcttccggcagctcttcaaaccgaagtcccacagtttccgcacccgcttctttcagaacggatacgatttcctgctgaatgcccatctgttcagccgtccccgtttttgccaatgcaatttttacactgacatgccgtttttccggcttgacctttacttctttaatggcatccaattctcccagcggtctatgaagaaaaggttcgcgcatgtttccgactatatttcttacttcatcttctcttatcatcgaaccctcaccctttgtgtattcgtttacaaatggtattataccatatattaaacgtagaatcggcgaaaaaccctccttactcgggagggtctcctttttctgtaaaatatctcaacacgcccttatacacggaagaagcgattttgtcctgatatttaggctggccaagccttttcgcttccgcgggattggacagaaatccgatttccaccagggcgcccggtttggttacattctgcattaagtaaatgccgtgtatccgtttcgcctttctcgttgtattctccaaattgattctcaattcgtcctgtatatattttgccactttttcattctcttcgtattttccatagtagaagctttgggcgccgctccatctcggtgacggtatggcgttcagatgaatgctgatataaagctccgcctctgaacggttgatgatctccacgcgctttctcagatcttccgctttgcgtctgctgtagcctttcgtcccttcaggagctaaatcagtatccgtctcccgcgtcataatgaccaaagctccctgctcctgcaaatagtctctgaccctggaggccacttcgagagtaatgtccttttcaaggtgactgcctcccgtggcgcctccgtccggcccgccgtgtcccggatcgagatagatgattttcccgctcagcggcaggctccacggccgccatgaatcatcattatggaattgaaaccggaataaacacaataatatgataaagccaagtaaaaaaccgagccatttcagcttttttgtcatagctttccctcccgcttgtccccgttattaataagtatgggacaagggaagaaattatgattacctcatgcggagcttacattgtttttctctttgcagaaatccttccgtccaccagctgttgataaaccggcaggacgcttcatagatttctttttgttcaacggaagaatattgctcatgcgtccaattgcaaagatattcaaaaaaatcggccgtcagttcttcctcttcttcagccgaacgggcgttcgccctctgcaaagactcaccataaaatccaaagacgccgaaccggccgcctaataaatacgcttcaattgcaaaatctatgcatccttcactcagaatgccgttttcgtcttgaagaaagggaaacaaaggggtgagacatgcttttacggactgaatgatctgcgtcagtgacagctcctttagtaaactcttctcaagctcataatccttctgccgtttcacgtctgaaaaagataatacttctgccattgccagccacgctcctttttactgttattttgaaaggaaaagggaaaaagcatgctttgttgatagtggaaatcctcccaaatgaaggagtttcatgttaactggaagaataaagagctgaggtgacgtgatgaaaaagctgtttcaatacaattggacggtgcgtgacgagtggtttatgatatgtgaaaagctgagccgggaggaactgacgaaaacccggacgggcggaatggagagcatcttgcggactttatttcatatcattgatgtcgagatcagctgggctcgtgccattttaggtaaagatgatgttttacccgctgagtctgactatacgagcattcaggatctcagaaagctgtctgaacagtatcgggaggatgtcattcatgcggtctcccgcaaaggggcggatcttgttaagccggactggatggaccaaacctttcctaaagaagatattctccgccacatccttgcgcatgagattcaccacatgggacaactgtcggtttgggccagagagattggaatagaaccggtttcggctaatgtgatcagccgtccgcaggaaaaagccgcaaaaaaacagcacctctgacgggatgccgtttttatattttaatgcttcttgttacggagtatgtattaatgtattcatccagcacgaggccgcctttgtcctcgtaaaaaccggcaaccataaagcctgcgtcaatctgacctttaatttgatcctccagcgtatggccgaattcaagcgcttcatgattatcaataagttcctttacctttttcttactcagatctttttcatccgaaaacggaatggaatactttacttttagtacgccttcctgctctaaatccatatcaaataagaacacgacgggatttacaaaaccggagactaaagacccgccttttttcaatacgcgataagcttctttccataccggaagaaccgtatcaacaaagcaattcgataccgggtgcacgataaaatcaaatgtctcatcatcaaaacagctcagatcattcatgctgcctttgacagtccgaagcgtaagaccgtcccgctgggcaaccattctgtcttgcgcaagctgtttttccgaattgtcaaagatggtgacgtccgctcctgcagcagcaaggaccggcccttgctgtcctcctcctgaagcgagacaaagaacctccagaccgtctatgggcggaaaccaatccgccggcacatcttttccgggggtcattctgatgctccaattgccttttttcgcttcaccaattgtatgagaatcaaccgcaaccgtccattcattgcctgtttcgacttttttatcccatgccttgctgttatgtatgactaacttattcattataactgcgctccttattggtaatgaatagagtataacaaacaattctagaaaaacatcggataacctcttcgatatgagaaaaaaatacaaaaaaaccacaaccaagaagttgtggtttttgccatccaaaacgattaacgttttgagaactgaggtgcacgacgagcgcctttaagaccgtattttttacgttctttcatacgggcgtcacgagtcagaagaccagcacgtttaagtgttgcgcggtattctggatctgcttcaagcaaagcacgagcgataccgtgacggattgctccagcttgaccagataagccgcctccatgtacgtttactaaaacatcataagtaccagctgtttcagttaaagttaatggttgtttgatatcttcgattagagccggagatggaatgtgctcgctgatttcacgattattaacgacgatacgaccttctcctggaactaagcgcacacgcgctacagaacttttacgacggccagtaccgtaatattgaacctgtgccaaattggtaacctcctttttaattaaccgcgaagttcgtaaacttcaggtttttgtgcttcatgtggatgctcagaaccacggtatacgttcaatttcttgaacatttgacgacctagagaaccttttggaagcatgcctttgatagcaagctcaagcattttctcagggtagtttgtacgcatttcaagagctgttcttgatttcagaccgcctgggtgcattgtgtgacggtagtagattttatcagttaactttttaccagttaactcgattttttcagcgttgatgatgatcacatgatctccagtatcaacgtgcggtgtgtaagtcggtttgtgtttcccgcgaaggatagatgcaacttctgtagaaagacgtcctaaagtcttgcctgctgcatcaacaactaaccacttgcgttcaatagtacttgcgttagccataggtgttgtacgcatttaattccctcctaaatgatctgtcattttttcataaacttctgttacgttctatttcacaacacaataagttccggggcttatcgtggggttgaaatacataccatatgatatcttataactttatgcagactctgtcaagaaaatgttacacctggtttagttgtcatagcaaacgctccataaatacagcccgtgccccggtgcggtgcgccccgcggcttcgcgatccttcgcttcgagcattgcttttacatcatcgggagaaaattttccagctcctgtatccaataacgttccggcaatgattctgaccatattatagagaaaaccgtttccggtgatccgcatctgcaggccgtctccggtctcagtccaatccagctcgtaaatcgttctgaccttatcctgaaccgcggtatcagccgcgcaaaagcttgtgaaatcatgtgtcccgatgaggtgccttgaagcttccctcattttctgcacattaagctgatatgcaaaatggtaagcgtaatgtcgtttaaatacgtccgggtgtttctccgtatatacaaagtagcgatattccttttggactgcgctaaatcgtgcatggaacccatcatccgcaatctctgctgttttgacggcaatatcatcaggcagcagggcattgagcgcaaacggccatttctcagccgggatggacagcggcgtatcaaaatgaataacctgcccggcagcatgaacatcgctgtccgtgcggcccgatgagatgacaggcaccctgccgtccgttttatggatgacggccagcgctttttccaattcactttgaacggtccgctttccaggctgaacctgatatccgttaaataaatgcccgtcataagcaatggtacatttcactctcattcagcagcacctctaacttcttaagaaaaacaataacacggctaatacgatgatgagcagaatggctccggtatcctttccggtccagacgagctttctgtatttcgttctcccctcaccgccctggtagcctctcgcctccatggcgaccgcaagctcttccgcgcgtttaaaggcgctgacaaacagcgggacaagcagcggaacaaccgctttgattctgtctttcaccgggccgcttgtaaagtccgcacccctcgccatttgcgccttcatgattttatctgtctcttccatcaatgtcgggataaatcgcaatgatatcgacatcatcaatgcgagttcgtgtacgggcagcttcacctttttaaaaggattcaagagctgctccattccatccgtgatttcaatcggcgttgttgtcagcgtcagcagcgttgtcataaagataaggtaaacgaaacggagggagataaaaatcccctgtataagtccgccctcatacactttaaaccagccaagctgaaaaatgacagatccttcatgcgtcatgaaaatgtgtaataaaaaggtaaacgccacaatccagataatcggcttaagccctttcagcaaaaagctgaacggcactcgtgttaaggcgatcaccccgaatgtaaacaaaccgagcaaagcatacgtttgtacgttgtttgccaaaaaaacgatacatacaaaaagaaagatgctgacaagttttgttcgcgggtccaatcggtgaataagcgatgatccgggaacatactttccgataatcatgctgtccatcattggtccttttcctcctgaaagaaagccttaatttcgctcgcggcatcctgcagggtcagcatgggtttttcatacttaactccgagagcctcctcaagccgtctctgaaacttcaccgactcaggaagatccagtcccatttcggccatctcttcaccttttacaaacaagtcacgcggactccccgtcgctttaatggtgcctttgtgcatgacgatcatttcgtcagcatagcgggcggcgtcctccatgctgtgggtgacgagaacggtagtcaggtttccccgctgatgaagcgcatagaacatgtccataatgtcctggcgccctctcggatcaagaccggctgtcggttcatccaaaaccagcacttccggctccatcgcgagaacgccggcaatcgccactctgcgcatctggccgccgctgagctcaaacggtgaacgatccaaaatgtcttccggaaggcccacaagccccagcatttcttttgctttccgttcagcgtcttctttttttacaccgaaattcatcggtccgaatgcgatgtccttcagcacagtctcttcaaacagctgatgttcgggaaattggaaaacgattccgactttttttcgcagagtcttaaggtctttattctttttaccggctgccagaatcgtgctcccgagctcaagctgtcctttagtcggtttcagcaaaccgtttaaatgctgcaggagcgtcgatttgcccgaccctgtatgtccgatgacggcaacgtagctgccctcttttatcacggcattgatatcatacagagcaagccgttcaaacggtgtcttcatttgatagcggtgttctacatctttgattttaatgtccacagctcattcaccagcccttcctgagtcagatggtttttcgttaacgccagtccgctttctttcaaaagcaggctgagctggaatgagaaaggcaaatcaagaccgatgcgaaccaagtcttcatttaatttaaaaatctcttcaggcgtgccctctgcatatttcctgccgccgttcatcacaatgatcctatccgcccttgcggcttcttccaggtcatgtgttatcgaaatgacggtggccatgccctgatcttttaagcgtctgacagtatcaaggacttcttctctcccaatcgggtcaagcatggatgtcgcttcatccaaaatcataatatcaggacgcgcggcaataattcccgcgatcgccactctttgtttttgacctccggagagatggtgcggctcttgatcaagaaaatcctgcatattgacttgtgtgacagcccaatctactctctcaatcatttcttcgcgcggaacaccattgttttctaaaccaaaagccacatcatcgcgaacagtcgttccgacaaattggttatcgggattctgaaagaccatccctattttttttcgcacatcccacacggtatcctcagtcagcttgatgccgccgacttcaatttctccggcctcaggcaaaatcagcccgttcagcgctctggccaaagtcgacttccctgaaccgttgtgacctacgatagcaagccattctccttcatatacctccagactcacaccgtccagcgccggtcttactgcatctttgcggtagcggaatagaatgtcttttacggatataagctgtttttgatccacgggcgcctgacctcctctcagctatagctctgcttttctgtctcatgataaaaagttctgatatctaaaaaaagggcatagatccagttagaaactgtcccgcccttctttagatacacaaaaatatgtgattaaaccaattcgatgattgccattggtgcaccgtcaccacggcgaggaccaagcttcataatacgtgtgtatccgccttggcgctcctcgtaacgagttgcaatgtcagagaataatttttgaagtgcatcttggttattttcttcattagcaacctcgttgcgaatgtatgcagcagcttgacgacgagcatgcaagtcaccgcgcttaccaagagtgatcatcttttcaacaacagagcgaagttctttcgcacgtgtttcagttgtttcaattctttcgttgatgatcaaatctgttgtaagatcacgaagcatagctttacgctgtgaactcgtacgtcctagttttctgtatgacatgtgatgtcccctcctttaatggaatgctgtttctaattaaaaaacacacgaaaatcctagttcacatggaaactagatcaatcgtctttgcgaaggccgagtccaagttcttcaagtttcgctttcacttcttcaagtgatttgcgtcccaggttgcgaactttcatcatatcttcttccgtcttgttcgcaagttcttgaaccgtgttaatgcccgcacgcttcaagcagttgtaagaacggacagaaagatcaagttcctcaatcgtcatttcaagaactttttctttttgatcctcttctttttcaaccatgatttcagcatgctgagcttcgtcagttaaaccgacgaatatattaaggtgttcagttaaaatctttgaaccgagagcaattgcttccttcggtccagtgcttccgtcagtccaaacatcaagtgtaagtttgtcatagtttgcaacctggcctacacgagtgttttctacctgataagataaacgagaaactggcgtaaagattgaatcgatcggaatcacgccgattggctgatcgtctcttttgttcgaatcagcaggtgtatacccacgtcctctttgtgcagtaaggcgaactcggaaactcgcattctcaccaagagtcgcgatatgaagatccggattaaggatttcaacatcgctgtcgtgtgtaatatcagctgctgtgacagttccttcgccctgtacatcaatttcaagcgtcttctcttcatcagagtagattttcaatgcaagctttttaatgtgcaagattatcgttgtaacatcttccacaacgccttcgattgtcgagaattcgtgcagtacaccatctatctggatcgatgttacagcggcaccagggagtgaggataagaggatacgacgtaaggagttacccagagttgtaccatatccacgctcaagcggctctacgacaaacttaccaaatttggcatcgtcgctgatttcaaccgtttcgatttttggtttttcaatctcgatcattacttaaaaccctccttcaaaacgtcgaaacctcgaatagaatcatatgagattccatccgaaattccccattgtttagtcccgtatgtgctcaggcaacgagtcggtgcattcgtttcataaataactgtatcataacccattattgacagggacacaaaatctatacaaacaaattacacgcggcgacgttttggtggacggcatccattatgaggaacaggagttacgtctctgatagctgtaacttcaagtccggcagcttgtaaagcacggattgcagcttcacggccagaacctggtcctttaacagttacttcaagagttttaagtccgtgttcgattgaacctttagcagctgtttcagcagccatttgcgcagcaaaaggagtcgatttacgagaacctctgaatcctagagctccggcacttgaccaagaaatagcattaccatgagtatcagtgatcgtaacgatcgtgttgttgaaagttgaacgaatatgagcgattcctgactcaatattctttttcacgcgacgtttacgcgtgttttgtttacgagcagcagccattgtttaggtacctcccttacttattttttcttgttagctacagtacgacgcggacctttacgagtacgcgcattgtttttagagttttgtccgcgaacaggcaaacctctgcgatggcggattccgcggtagcttccgatttcgatcagacgcttgatgttaagagaaacttcacggcgaaggtcaccttctactttcagtttgtcaataacatcacggattttaccaagttcttcttcagtaagatcacgcacacgagtatcttcagaaacaccagcctctttcaagacttgctgagccgttgtgcggccaattccgaagacatatgttaaagaaataacaacacgtttgtcacgtgggatatctacaccagcaatacgagccattctctgggcacctccttattaattatccttgtttttgtttatgctttggattttcacagatcaccattacttttccttttctgcgaataactttacatttctcgcagattggtttaactgatggtctcactttcatgtgtttccaacctccttcagtttccggagtgctttatttgtaacggtacgtaatcctgccacgagttaagtcatatggagataattctaccgtaactttgtctccaggtaaaatgcgaatgaagtgcatgcggattttaccagatacgtgagccaaaaccgtatggccattttcgagttcaactttgaacatcgcgtttggcagtgtttcgacaatcgtaccttccacttcaattacatcgtctttcgccattcaagtgttctcccttcttcaaatcagtaacttgctctctgacaaatttcaaaagagaaaatctcagttatccgtttgtcacacgccctgtttcgtttatactgttctgaacttccggagatacgcaatcataaagggtgaatgattgatattctttttctaaggagaatgaaatgtacgcttttctccgtctgctttagtacacgatgatgaatcttccttccgatgacagcagctagccggtttttcttccgaccaattgtaaacctacaatctgcccaggtgcggaatgaaaaacatgtgtcatggaattcatttcatcatctagacttttgtcagtatatcaaaacccgtttccgtaatcgcaatcgtatgttcaaaatgagcacactttttcccatctaccgttacaaccgtccagttatcagccaatgttttcacataccggctgccagcgttaaccatcggttctatagcgagaaccataccaggcttcagcctaggtcctttgtttggcggaccgtaatgaggaatttgcggatcctcatgcaagtcttgaccaacaccatgtccgacatactccctaacaactgaaaactgctcattttcgacatacgtttgtattgcgtgggaaatattcgacaaacgttcacctggttttgcttccttcaagcctttatataaagactcctctgtcacttccagcagtcgtttatcatcatcactgatgtttcctaccggatatgtccaagcagagtcaccatgataaccatttaatttagcaccgatatcaatgctgataatgtcaccgtcacgcaaaacccttttaccgggaattccgtgaacgagttcttcattaactgatacacagatgctcccgcgaaacccattataccccttaaaagatgggattgcaccctgcttctcaataaaacgttcggcaatttgatccaattcttttgtcgagattcctggtttaatgtgctttttcatctcttcatgagtcaaagccacgattcgccctgcttcccgcatgatgctaagctcacgaggggtcttacagataatcatttgctcaatcctccaagaagctctttcacatctttgtacacgtcgttaatgtcctgctggccattgacgttgacaagataccctttctcagaataaaaatcgagtaaaggctgagtctgcttcatgttgacctcaagccgttttgagacggtttcctcattatcatctgcccgttgataaaggtctcctccgtctttatcacaaacacccggcgttttcggcggattgaaaaccaaatgataggttgtgccgcaaacactgcaaattctgcgtccagtcaaacgttccattaaagagtctttgtctactttaatgttaatgacataatcaatcggcttgccgtattcctcaagaatgttttcaagagcttcagcctgagcgactgttcgcggaaatccgtccagaagaaaacctctttcacaatcatctttgccgagtctttctttgacaatgccgattgtgacttcgtccggtacgagctcgcctttatcaatataagactttgcttcgagtccgagtggtgtttcttctttcatagcagcacggaacatatctcccgttgagatatgaggtatcccataatcctcaacaattcgttctccctgtgtgcctttaccggctccaggaagtcccattaagactaagttcattcggatttcccccgtcctctcttatttagaggaatggttaaaaccagtcctctaatttttcataaatcctcggtaattacgtttcactaactggctctccagctgcttcattgtctccaaggctaccccgacgacaattaacaatgatgttccgccaatctgtgcactttgaggcaatccagcgaattgaatgaaaaagataggaagaatggaaatcacggctaagaatatagaacccacaaacgtaagtcgatacaaaatgctcgtaattctatcttgagtcattttccctggacgaacccccgggatatagccaccctgtttttttaggttatcagccatttgttcagggtttacctgcacaaaagcatagaagtacgtaaaggcgataattaatgcgacataaaccgtcatgcccaccggatgtgtattgtcaaagttggcttgaatccactttgtcacatcgttttctccgaaaaatgacgcgatagtacgcggcgtaataaggaacgcaaccgcaaagattaccggaataacccctgccggattcactttaagcggaaggtgagttgactggcctccgccaacaggtgaacgaccttgcccttttgcatattgaatcgcgattttgcgtacagcctgctgaatgaaaataacaccaacaataacggctaaaatcgcaatcaccagtaaagcgattttcacaatatgaataaacagctgatcgctgctgccgacaaattgagtctcataaatctgcccaacagttttcggaatactagccacaatccccgcgaagatgatgatcgaaattccgttacctactccattggaagtaatttgttctcccagccacattaaaaaagcagttcctccagtgagtactaaagcaataatcagatatgtcgatatgccggatttttcaatcagcataccgtttgccaggttgttaaacccgtaagacatacctaatgcctggataaaaccaagcacaatcgtaaaatatctcgtgaactgagctaatttacggcggccgacttcaccttgcttagaccactcggtaaacttcggcacaacatccatctgaagcagctgaatgatgatcgaagcagtgatgtaaggcgtaattcccatcgcaaaaatggagaactgataaagcgcaccgccgccaaatgtgttaaggagatcaaaaacccccatcgaactttgtgtctgcaacgcctgagcatttacatatggcacagggataaacgcacctatgcgaaagacgataagcatgagtaatgtaaaaatgattttattccgaatatcactcacacgcataaagttggagattgtcttaaacaagttagatcacctcagctgtaccgccagcagcttcaacagcttctttcgcagaagcagagaatttattggcttttacagttaattttttctctaatttaccgttgccaagaatctttactcctgcattaagtttgctaataacaccagtctcaagaagaagttcaggagtgacttccgttccttccgcaaaaccgttcaatttgtctacgttcacaatagcgtattccttacggttgatgtttgtaaaaccgcgcttaggaagacgttggaataaaggcatttgtcccccctcgaatccagggcgtacaccgccgccagaacgagcgttttgacctttgtgacctttaccagctgttttaccgttaccagaaccaataccacgacctacgcgattgcgtactttacgtgaaccttctgaaggctttaattcatgaagtttcattaggacacctccttagcctataatttatttttattgttctttaacagaaactagatgagatactttattaatcataccgcggatcgcagcgttatcttcatgaacgacagtttggtttgttttctttaaaccaagtgttcttacagtaacgcgctgatcttccgggcgaccgattacactgcgtttgagggtaatttctaatttagccattaatgttccctccttatcctaacagttcttctacagattttccacgaagcttcgcaacctcttcggcacgtttaagctcacttaaaccttgaagtgttgcacggatcatgttgatcggtgtgttagaacctaaagacttagaaaggatatcagcaacgccagcaagctcaagtaccgcacgtacagggcctccagcgataactccagtaccttcagaagcaggtttcaacaagatattgcctgcaccgaaacgtccgatgatttcgtgtggaatcgtagttccaaccattggtacttcaatcaaattctttttcgcatcttcaacagctttgcggattgcttcaggtacttcttgtgctttaccagtaccgaaacctacgtgaccgtttttgtcaccgacaacgactagagctgcgaaacggaaacgacgaccacctttaacaactttcgctacgcggttaaccgtaactaagcgttcttctaactctaatttgcttgggtcaatacgacgcataatcatgtgtccctcctttttttattaaaatttcagtccggcttcacgagctgcatcggccagagcttttacacgtccatggtataagtatccgccgcggtcaaatactacgtcagaaacacctttctcagaagcgcgtttcgcaacgagttcaccgactttagcagcagcagcgctgtcaccagtgctttccacgttcaaatctttatcaagagtagaggcactagcaagtgtaacgccatttacatcatcgatgatttgagcataaatgtgtttgtttgaacggaacacattcagacgaggtctttcagctgtgcctgaaagtttagcacgaacacgggcatgtcttttttgacgagcagcatttttgctagttttcgtaatcatccttaggtcactcctttcttcactttaagcggtcttacttagcagatttaccttctttacggcgaacaacttcaccttcgtagcggattcctttacctttgtaaggctctggagaacgtacagcgcggatgttagcagcgatagctcctacacgctctttgtctgtaccttttacaactactttagtttgagaaggaacttcgatttcgatgccctcttcaggaacgatctcaacagggtgagagtatccaacgtttaaaacaagtttgtttccggatttagccgcacgataaccgacaccgactaattccaaacctctttcaaatcctttagatacgccttcaaccatgtttccaagcagactgcgagtcgtaccatgcagcgcacggtgctctttgtgatcagaaggacgagtaactgtaagcacgttgtcctcaattttgatttccatatcaggatggaaagtacgagttaattctccttttggtccttttacagctacagtgttgccttcgttcagcgttactgtaactccagaagggatctcaagcagttttttacctacacgagacatactaaaacacctccattcttgttaaacttcttaccaaacgtatgctagaacttctccaccagcttgttttgcacgggcttctttgtccgttaaaacaccttgtgatgtagaaataatcgcgattccaagaccgttaagtacgcgaggtacttcatttgatttagcgtatacacgcaaacctggtttgctgattcttttaagaccagtgataacgcgctcgttgttttgtccgtatttcaagaaaacgcggatgataccttgtttgctgtcttctacgaactcaacgtcacgaatgaaaccttcacgctttaaaatgtcagcaatttctcttttcaatttagaagcaggaatttcaagcttctcatgacgtaccatgtttgcattgcgaatacgagtcagcatatctgcaattggatctgtcataaccattatataattacctccttcccattcttggggattaccagctggcttttttcacgccaggaatttgtcctttatatgcaagctcacggaaacaaatacggcaaagtttaaatttacgaatgactgagtgcggacgtccgcagcgttcacagcgagtgtactcttgcactttaaactttggtgtacgttgttgtttcgcaatcattgactttttagccacgatttcgcctccctttcattgattatttctggaacggcatacctacttgagttaatagctcacgagcctcttcgtcagagttagcagtcgttacgataacgatgtccattccgcgaacctttgttactttatcgtagtcaatttcagggaagattaactgttctttgataccaagagtgtagtttccgcgaccgtcgaaagatttcttagaaatcccgcggaagtcacgtacacgcggtaaagatacagaaataagtttatcaaggaaatcatacatgcgctctccgcgaagagttactttcgcaccgataggcattccctcacgaagacggaatccagcaattgatttcttcgcacgagtaacgacaggtttttgacctgcgataaacgttaattcttcaacagcactgtcgattgcttttgcgttttgaacagcatcaccgacacccatgttgattacgattttttcgatttttggcacctgcataacagagtcgtagttgaacttcgtcattaaagcaggtgaaatttctttattgtacttttctttaaggcggttcatgagatagacctcccttcctttaaatactatttatctaagacttgcccagatttttttgcaacacgaacttttttgccatcttccactttgtatcctacgcgagtcacttcaccagttttaggatcgagcggcataacgtttgatacatgaattggcgcctcttgattagaaataccgccttgagggtttgcttgagttggtttagagtgcttcttcaccatgtttacgccctcaactagaacgcggtcctttttagggaaagcagcaaggatcgtaccttgtttgcctttatctttaccagagataaccattactttatcgccttttttcacatgcatcctgatcgcacctccttgagtaaggcatttatttcattagataacttctggagccagagaaacaattttcatgaagttgttttcacgtaattcacgggcaaccggtccgaagatacgagttccacgcgggctcttgtcgtcacggatgataacacatgcattctcatcgaagctgatgtatgatccgtcagatctgcgtgctccgctttttgtgcgaacgataacagctcttacgacttcaccttttttgacaacgcctcctggtgttgcttgtttaaccgtgcaaacaattacatcaccaatgttagccgttttacgtccagaaccgccaagaactttaatagtaagtacctcacgcgcaccggagttgtcagcaacttttaaacgagtctcttgttgaatcattatttgttacctcccttcggaaaaagaattccgaactttattagataataacagcttcttcgacaacttctactagacgaaaacgcttagttgcagataatggacgagtttccatgatctttacgatgtctccgattttagcttggttattttcatcatgtgctttgaatttctttgagtattttacgcgtttaccgtaaataggatcctttttgtatgtttcaacaacaacagtgatggttttatccattttgtcagaaacaacacggccttggtaaactttgcgttggttacgttcgctcatgctcacgacctcccctcagtgattatttgttggcagcaatttctctttcacgaatcacagttttcatgcgcgcgatagctttgcgcacttcacgaatgcgagcagtattttcaagttgtcctgtcgctaattgaaagcgaagattgaaaagttcttctttaagagactttactttttgttcaatttcagcagtggtaaggtcacgaatttcattagctttcatttgattcaccaccaatttcttcacgttttacgaacttcgttttaattggcaatttgtgagatgcaagacggagagcttcacgagctacctcttcagacacaccagaaatttcaaataaaactttgcccggttttacaacagctacccagccttcaggagcccctttaccggaacccatccgtacctcaagcggtttagcagtgtaaggttttgaagggaaaattttaatccaaactttaccgccacgtttcatgtaacgagtcatcgcaatacgtgcagcttcgatttggcggttcgtgatccaagaagcttcaagagcctggataccgtactcaccaaaatgtacttcagtaccgcctttagcgcgaccgcgcatttttccgcgatgctctctgcgatatttaacgcgttttggtaataacatattattttcctccttcctcagttttcttcttagtaggaagaacctctccacgatagatccagacttttacaccaagcttaccgtaagttgtgtcagcttcagatgttgcatagtcgatgtcagcacgtaaagtgtgcaatggaacagttccttcactgtagtattcagaacgagcgatatcagctccgccaagacggccggaaaccattgttttcacaccttgtgctccagcacgcatagtgcgttggatttgttgtttctgcgcacggcggaaagaaatacggttttctagttgacgagcgatgttgtcagctacaagctgagcatcaagatctgctcttttgatttcaagaatgttaatgtgtacacgcttgccagtaaggctgttaagggctttacgaagtgcttcaacttcagatccgcctttaccgattaccataccaggcttagcagtgtggatcgtaatgttaacgcggtttgctgcacgctcgatttctactttagaaacagaagcgtcagaaaggcgtttgctaatgaattcacgaatttttaaatcttcgtgcaggaagtcagcgtaatctttaccagcgtaccacttagattcccaatcacgaatgactccgatacgaagaccgactggatttaccttttgacccactacttatccctccttcttttctgatacaacgattgtaatgtggctcgtacgtttgttgatttggctcgcacgtcccatagcacgcgggcggaatctttttaacgttgggccttcgtcaacaaatgcctgagaaataaccagattgttagcgtccatctcgtagttgtgctcagcatttgcgatagcagattttaaaactttttcgatgatcggagaagcagctctcggagttaggttcaagatagatactgcttcgcctacttgcttacctcgaatcaggtccattactagacgtgctttacgaggagcaatacggactgttcttgcaacagctttagcttgcatttaaaagcctcctctcttagcgtcttgtttttttatcgtcactggcgtggcctttgtaagtacgagtcggtgcgaattcgcccaacttgtggcctaccatgtcttcagaaatgaatacaggcacgtgtttacgtccgtcatatactgcgatagtgtgaccgataaattgtgggaaaatagttgaacggcgagaccaagtttttacaacttgtttcttgtccgtttcatttaatttctcgatttttgtcatcaagtgtccatcgacaaatggtccttttttcaagctgcgagccattttggaacctcccttcgtgattgcactacggtccgaaatgaaccgtagacaaccccgttatttatttttacgacgacgtacgataaatttatcagatttgttctttttcttacgtgtcttgaatccaagagtcggtttgccccaaggagacattggtgatttacgtccgattggcgcgcgaccttcaccaccaccgtgcgggtgatcgttagggttcattacagaaccgcggactgtagggcggatgcctttccagcgagagcgtcctgctttaccaacgttgataagttcgtgctgctcgttacctacttgaccgatagaagcgcggcaagcagaaaggatcatgcgaacttcaccagagttaagacgtacaagaacgtatttgccttctttaccaagaacctgagcagatgtaccagctgaacgtacaagctgtccgcctttaccaggttttaattcaatgttatgcacaactgtaccaacagggatgttgataagcggaagtgcgttacctactttgatgtcagcttcagggccggacatgatttcagtacctacttgaattccttttggagcaagaatgtaacgtttttctccgtctacatagttgattagtgcaatgttagctgaacggtttggatcgtactcaactgtagcaacgcgtccaggtataccatctttatcgcgtttgaagtcgataacacggtattggcgtttgtgtccgccaccttggtgacgtacagtcaatttaccttggttgttacgtccgccttttttgtgaaggggcgcaagcaaggatttttccggctggtcagtcgtgatttcagcaaaatctgaagttgtcatgccacgacgtccgttagaggtcggtttatactttttaatcgccattttgaatttccctccttctttttacagataattaagcttcaaaaatttcgatttctttgctgtctgcagtaagttttacgatcgcttttctgcgacggctagtcataccagtatagcggccgacacgttttgatttccctttgtagttcatgatgttgactttgtcaactttcactccaaagatactttcaactgcatctttcacttctgttttattagctcttacatcaacttcaaaagtatatttcttttcagtcattaaatcagcagaacgttcagtaatgacggggcgcttaagaacatcacgaggatctttcattatgcaagcacctcctctactttttcaaccgcagcttttgtaatcagaagcttctcgtggttgacaacgtctaacacgttgattccgttagcttgaacaactgtaactccagggatgttgcgtgcagaaagagatactgcttcgtttgcatccgcagttacgattaaagcttttttctcaacagataatcctttaaggacagctgccatttcttttgttttaaccgtatcaagagtaagatcttcaagaacaataatgttgttgtcgttcactttagaagacaatactgatttgattgccaagcggcgaacttttttaggtaatttgtaagaatagctgcgtggtgttgggccgaatacgacaccacctccgcgccattgcggtgaacggattgaaccttgacgggcacgacctgtacctttttgacgccatggtttgcgacctccgccgcgtacttcagaacgattttttactttgtgagatccttgacgtaaggaagctctttgcataagaatagcgtcgaatactacgctctcatttggctcaattccaaatacagaagcgtttaattcgatatcaccagcagtagaaccgttttggttgtataatgctacttttggcatgatcaatttcctcctttcctaagagacttatttagatttaacagcacttttaacagtgattaaagcttttctcgcaccaggtacgttacctttaatcaaaagaagattgcgctcagcatctacttttacgacttcaaggttttggacagtgatttgatctccgcccatgcgtccaggtaatagtttacctttgaatacacggttaggatctacaggtcccattgaaccaggacgacggtggtagcgtgaaccgtgagacataggtccgcgagattgtccgtggcgcttgattgcaccttggaaacctttacctttagatactcctgttacatctacgatttctcctgcagagaaaatttcaaccttgacttcctgaccaatttcatacgcatccatatccacgccgcgtaattctttaacgaagcgcttaggagcagtttccgcttttgcaacgtgtcctttttccggtttgtttgaaagcttttcgcgcttatcgtcaaaaccaagctggatcgcttcatagccatcattttcagctgttttcttttgaagaacaacgtttggagctgcttcaataacagttaccgggataagatcaccgttctctgcgaatacttgcgtcataccaatttttcttcctaagattcctttggtcattcgtcacacctcctattaagatcattctatattttagaattaaagtttgatttcgatatcgacaccagatggtaagtctaatcgcatgagagcatcaacagtttgtggtgttgggttcacaatgtcgattaaacgtttatgtgtacgcatttcaaattgctcacgagaatctttgtatttgtgcaccgcacgaaggattgtgtaaactgatttttcagtcggcaacggaatcggaccagatacgctggcaccagaacgttttgccgtttcaacaatcttctctgcagattgatcaaggattctatgatcatatgcttttaaacgaatacgaattttttgttttgccattattttccctccttttcgcctacatcacgttagacagttctccgtgagaaaaacctgatcaccttgccatggcaaagcggccgggtgtgtcagcaacctctcacttcatcgcagtcaaagaccaacatacactattatacagaaaatagacgcatgttgcaaggtttatttaaagaaccttgtggttttcacactttgattattatacaggtgataccatgattaatcaaggatatgactgttttctttcagagatggaacgatgcgaaccggctgacaacttcggcaaagcgatccggttcctccaagtgaggcgaatgggctgagttctcaaaccaatgccattctttatacggcgcatcaaccttctgataatattcataagacgtcgtccccggaaccgtcaaatcgtatctccctgacataaaacagcacggtattacaatagaagaaactgattcccctgcatcaaaggaaatgagatcctcccacaggtgtttcaggctgaacatttgtccccgcgcggctaagaagctccctctcacaccgtacggttcaccaaacagcattcgcccccctgctttaagagcgccgatcggatgatgggtaaagccccctcccctcatttcaatacaaagcagaaacagcgttcgctgcagctgtttctcccatgggggtgctccgataaagctcagcgtcttgcccagcaggatatgtttgtgttgcctgctccattccatcatcaaccggtaggcttccgtttcttccttttgaatattaaccacctgactgataccgatatacgcataatacaaatcaggtttctcttgaagaacttgaagcgccaaaactgaaccccacgaatagccggcgatatatatttttctcctgctgaattgcttgcataagcgttcggtcagatgaatggtgtcagctgtcagctgatccaaagtcatagatgaacccggaatttcctttgaataagagagacccgcccctctctgatcccagttcacaacggtgaaatgcttttccagctcattctggtattttctcgcataaccgatttgaggcgtgccgggaccgccatgcaaaaacaaaagcagcggactactcctgtcatcaccattaatcataatggtttgttcactgccattaatctgcaattgctgaagcattgaaatacgattggttttcttgaagttatcgttcatcggtctgctcctaaaatttgtatacgttctattatacatggaatcagcagggaaacaaaaaaacgaggccccataagggaccccgcattattgaacgagtcgattactcagtgattgtagaaacaacgcctgaaccaactgtacgtccgccttcacgaatagagaaacgagttccttcttcgatagcgattgtagagataagttcaacgatcatttcagtgttatctccaggcataaccatttctacgccttctggaagattgatgataccagttacgtcagttgtacggaagtagaactgaggacggtagttagagaagaatggagtatgacgtccaccctcttctttagaaagaacgtaaacttcagctttgaatttgctgtgtggagtgattgtacctggtttagcaagtacttgtccacgttggatgtcttcacgagctacaccgcgaagaagtgcaccgatgttgtctccagcttcagcgtagtcaagaagcttacggaacatttcaacacctgtaacagttgttttgctgttttcttcttgaagaccgatgatttcaacttcgtcaccgactttaacttgtccgcgttctacacggccagtagcaactgtaccacgaccagtgattgagaatacgtcctcaactggcatcatgaatggtttttcagtgtcgcgttctggagttgggatgtactcatcaactgcagccataagttcaagaattttttcttcgtactcagcatcgccttcaagagctttaagagcagaacctttaacaactggtacatcatcaccagggaagtcgtattcgctaagaagatcgcgaacttccatttcaacaagctcaagaagctcttcgtcgtctaccatgtcgcatttgttaaggaatactacgatgtatggtacaccaacgtttttagaaagaaggatgtgctcacgagtttgtggcattgggccatcagcagcagatactacaaggatagctccgtccatttgcgcagcaccagtgatcatgtttttaacatagtcagcgtgtcctgggcagtcaacgtgtgcatagtgacgagtgtcagtttcgtactcaacgtgtgcagtagagattgtgataccgcgctcacgttcttctggagcaccatcaatttgatcgtacgccatagctgtacctttaccagatttcttatgaagtactgttgagatagcagcagttaatgttgttttaccatggtcaacgtgtccaattgtaccgatattggcatgtgatttggaacggtcgaatttttctttagccattctaaaatcctccttaagagcttttaattagtaatgtatagagtgatagaaagtgaaagcaagctctcacttcctcatcttacaatagtagttatacttgagttaagtggcaaaatcaattattcgcctttattttttttgataatttcttcagcgatgctcttcggcacttcttcgtagtgatccatgaacattgtgaacgtaccgcgtccttgcgtgttagaacgaagggcagtagcgtaaccgaacatttcagcaagaggtaccatcgcacgcacaacttgagcgttaccgcgagcttccataccttctacgcgtccgcgacgagaagtaacatcacccatgatgtctcccatgtattcttcaggaataacaacttcaactttcatgattggttcaagaagaactgggttacatttgctgactgcatttttcaatgccatagaagcagcgactttaaacgccatttcgtttgagtcaacatcatggtaagatccatcaaaaagtttcgccttgatgtcgattagcgggaatccggctaggacaccattttcaagagagtcttcaagacctgcttgtacggctgggatgtattcacgaggaacaacaccaccgacgattgcgttttcgaattcaaagccagcgccttcttcgttcggttcaaattcgatccaaacgtgaccgaactgaccgcgtccgcctgattgacgtacgaatttaccttcaacttttgcaccggtacggaatgtctcacggtacgcaacttgaggagcaccaacgttagcttcaactttgaactcacgcttcatacgatcaacaatgatatcaaggtgaagctcacccataccagagatgattgtttgacccgtttcagggttagtttgtgtacggaatgtaggatcttcttcagcaagtttcgctaaagcgatacccattttatcttggtcagcttttgatttaggctcaatcgctacgtcgataacaggctctgggaattccattgattcaaggattacaagatccttttcatcacacagagtatctccagtagaagtatcttttagacctacagcagctgcgatgtctccagcgtaaacagtagagatctcttcacggctgttagcgtgcatttgaaggatacgtcctacgcgctcacgcttgccttttgtagagttctttacatatgaaccggaatcaagtgtaccggaatatacgcggaagaatgtcagcttaccgacataagggtcagtcataactttaaatgcaagtgcagagaacggctcttcatcagaagaatgacgaacgatctcttcatctgtatcaggacgaacacctttgattgcagcaacatcagttggcgcaggaaggtagtcaagaacagcatcaagtacaagctgaacacctttgtttttgaaagcagaaccaacaagtacagggtagaattcaacattcagtgtacctttacggatagcagctttcagttcagggatagtgatttcttcaccttcaaggtacttttccataagctcttcatcaagctcagctacagcttcaatcaggctgctgcgaagctcttcagcttgctctttgtactcttcagggatttctttcgcatctgaacgagttccaaggtcatcttcgtagaaatacgcaacgttttctactaagtcgatgataccttcgaagttgtcttcagcgccgatcggcaattgaattgcgtgagcgttagcttgaagacggtctcttaaagtgcctacagagtaaaggaagtctgcgccgattttgtccattttgttgacaaatacaacgcgcggtactccgtaagttgttgcttggcgccatactgtttctgtctgaggctcaacacctgattgagcatcaagtacggcaaccgcaccatcaagtacacggagtgaacgttcaacttcaactgtgaagtctacgtgtcccggtgtatcgatgatgtttacacggtaacctttccactgtgcagtcgttgctgcagaagtgattgtgataccgcgctcttgttcctgctccatccagtccatttgcgaagcaccttcgtgagtttcgccaattttgtggatacggcctgtgtagaacaagatccgttctgtagtagtcgttttaccggcatcgatgtgagccatgatcccgatattacgagttttttctaaggagaactctcttgccattgggtaatttctccttccttattagggaattattattttgattatatgaatcctaccagcggtagtgagcaaatgctttgttcgcttctgccatcttgtgagtgtcttcacgtttcttaacggcagcaccagtgttgttagctgcatcaagaatttcgttagccaggcgctcttccattgttttttctccgcgaagacgcgcatagttaaccaaccagcgaagaccaagagttgtacggcgttcaggacgaacttctacaggcacttggtagttagctccacctacacggcgtgcttttacttcaagtacaggcatgatgtttttcaatgcttgttcgaaaacctccattgcatcattgccagtgcgttctttaatgatatcgaatgacttgtataggattgtttgagatttaccttttttaccgtcgatcatcattttgttgatcaggcgggataccagcttagagttgtaaagcggatcaggtaaaacatctctttttgctacaggacctttacgtggcatctgaatatcctcccttcatagttttaatgatttattattattactttgctttaggacgtttcgtaccgtatttagaacggccttgcgcacggttttcaactccggcagtatcaagcgcgccacgaacgatgtggtagcgtacccccggtaagtcttttacacgtccgccgcggatcagtacaacgctgtgctcttgcaggttgtgaccgataccaggaatgtaggcagtaacctcgattccgttagtcaaacgaacacgagcatatttacgaagtgctgagttcggttttttcggtgtcattgtaccgacacgagtacataccccgcgtttttgtggagaagatacgttagtgtgctcttttttaaagctgttgtatcctttgtttagtgcaggtgacttagagttttcaactttgctcacgcgtcccttgcgaattagctgattaattgtaggcatgttgtgttcctcccttcattacgttttataacccacatacccaggtggttcatcattaggcaaaaaaacaatgtctttacataagattgatatcttatataaaaacaaaaagtacgctataacataatggcaacagctgctgctcccacttcaattccgcaggctttgccgagctttttcatggaatccaccatacagacagcggtattttggttctttgcaagctggataacgccagccgtaagaactgaatccgcgtcttttgccacgacgacttccttcactgaacctcgttttagagctttcactgtttgcttcgtaccaataataattgatttggcctgtgatactttatcataagacataaacatatcctccaaagtaacaggttttatttcgagcaccttggttatattatcactctgcgggacggatgtcaacaacgtatgacattttttagtgcagtcccccgccagaataattgtaatactgaggaaaagctgtcgaaacagcctttcctgcagcagtttctgttattcagccggaaccatatcttccgaaggctgaacgtttgaaacaggttttacttttctgtaattcatcatacctgtaccggccggaaccagtttaccgatgatgacattctctttcaggccgagaagttcatcacgcttgcctttaatcgcagcatctgtaagaacgcgtgttgtttcctggaatgatgcggcagacaagaatgaatccgtctcaagtgaagctttcgtgataccgagaaggacaggacggcctgtagcaggtcgattgccttcaagcagcacttttttgttcgcttctgtaaattggtgaatatcaagcaatgtgccagggagaacatcagtatctccggcatcgattacacggactttgcgaagcatctggcgaaccattacttctacgtgtttatcgccgatttcaaccccctgcatacggtaaaccttctgaacctcatgcagaagatattcctgaaccgttgtcaggtcagtaactttaagaagttctttcggatcgattgaaccttccgtcagcacttgaccgcgggtaatctgatcaccctcagtcactttcaggcgtgagttgtaaggtgccgtgtatgaacgggtctcaacagcaccctgaacaacaatctcctgctgtttgtcgcggacttcattgatttcggcaattgtaccgtcaatctcagaaatcgtcgcttgacctttcggattacgcgcttcgaaaagctcctggatacgcggaagaccttgtgtgatatcgtctccggcaaccccgcctgtgtggaacgtacgcatcgttaactgtgttccaggctcaccgatagattgagcggcgataatacctactgcttcgccgacttcaacatcagttccggttgcaaggtttcgtccgtagcatcgtttacatacaccatgaggagtgttacatgtgaacgcagaacggatccacacttcttcgattccggcttcaacgatttccagcgctttatcttcatcgatcaattcattttcgttaatgagcacagcacccgtttcaggatgtttgatctgttttctggcgaaacgtccgatcagacgctcttccagacgctcgatgatttccgtgccttctttgagcggttttgcaagaataccgcggtctgttccgcaatctgtttcacgaatgataacatcctgcgcaacatcaacaagacggcgtgtaaggtaacctgagtcagctgttttcagggcggtatcggcaagacctttacgcgcaccgtgagtggagataaagtactccaatactgtcagaccttcacggaaacttgatttaatcggcaattcaatgattcgtccagccgggttggccatcagaccgcgcatacccgcaagctgtgtaaagttagatgcgttaccacgggctcctgaatcactcatcatgtagatcgggttgacttcgtctaatgatttcatcagtttgccttggataacatctttcgctgaactccaaattgaaatgactctttcataacgttcttcttcggtgattaaaccgcgtctgaactgtttcagaacattatctactttgctttgtgcttcttcaaggatttcctgtttatcatcgagaacgacgatatcagaaacccctactgtgatgccggctttcgttgaatatctgaaaccgaggtttttcatgcggtcaagcattttagacgtttccgtgatatggaatcgtttaaagatttccgcgatgattttacccaaaataccttttttaaacggtgcgttgatcggctgctcagcaatcacagcttttacgtcagcacctttatctaagaagaaacggtcaggtgtcttctcttcaatgttgctcttcgttggttcattcatgtaagggaatgattccggaagaatttcattgaagacgagcttaccgacagttgtaattaacaattttgaacgctgttcttcagtaaatgtcacattcttaagggagttcgctgcaacagctactctcgtatgaagatgaacataaccgttttgataagcaagaagcgcttcgtccgtatttttgaaaaccataccctcgccgactgctccggcgcgctcaagcgtcaggtagtagtttcctaataccatatcctgagacggcgtaacaaccggtttaccatctttagggttcaagatgttttgggccgcaagcatcagaatgcgcgcctcagcttgagcctcagctgataaaggtacgtgaaccgccatttggtcaccgtcaaagtcagcgttataagctgtacatactaacgggtgaagacggatggcgcgtccttcaacaagcgtcggttcgaaagcctggatacctaatctgtgaagagtaggggcacggttcagtaagaccggatgctccttaatgacagattcaagtacatcccatacttcaggctgcacgcgttcgattttgcgttttgcgctcttgatattgtgagcaaggcctttttcaacaagctctttcatgacgaaaggcttgaagagctcaagcgccatttccttcggcaaaccgcactgatacattttcagatgcggacctacgacgataacggaacggcctgagtagtctacacgtttaccgagaaggttctgacggaaacgcccttgtttccctttcagcatgtgagaaagagatttaagcggacggttacccggtccggtaaccggacggccgcggcgtccgttgtcaatcagagcgtcgactgcttcctgaagcatacgtttttcgttctgaacgatgatgcttggcgcgccgaggtctaacagacgttttaaacggttattacggttgatgacacgacggtaaaggtcgttcaggtcagacgttgcgaaacgtccgccgtcaagctgaaccatcggtcttaattcaggcggaataaccggaagcacgtcgagaatcatccaagacggcttgtttcctgaattacggaaggcttcaagcacttcaaggcgtttgatcgcgcgtgtacggcgctgtccttgagaagtcttcagctcttcttttaacatatcaacttctttgacaaggtcgatgtcctgcagaagtttattaatggcttccgcacccatagaggcttggaatttgtttccgtacttatccagatacgcacggtattccttttcagataaaagctgtttcttttcgagcggtgtattggccgggtcagttacgacgtaagaagcaaagtaaataacttcttccagcgcacgcggtgacatatccaatacaagacccatacggctcggaatacctttgaaataccaaatgtgagaaaccggggcagccagttcaatatgccccattctctcacgacggactttagcccgcgttacttcaactccgcaacggtcacaaactacgcctttataacgaacccgcttgtacttgccgcaatgacattcccagtccttagtcggtccgaaaatgcgttcgcagaacaggccgtccttttcaggtttcaacgtacgatagtttatcgtttcaggctttttcacttcaccaaaagaccatgaacggattttatccggtgaagcaagaccgatgttcatatactcaaaattgttcacatctagcaaggggcctacctccctttttatcttcggattaaccgatgtcacttgcctttatcaatcagagactattctttcgttactgcgtcacgttcaacgtctggagatgctgtttcttccggcgcttcatcacctgataatgcaaggccgtcagcctgtttcgcatcttcctcgtcttctagatctctcatttctatttcttcttcatcgcctgagaggatttttacgtccatacctaagctttgaagctctttgatcaatactttgaatgattccggaacaccaggctctggaacattgtcgcctttgacgatggcttcatatgttttcacacgtccgaccacgtcatcggacttcacagtcaggatttcttgaagcgtgtaagctgcgccgtaagcttcaagcgcccaaacctccatctcaccgaaacgctgtccgccgaattgggctttaccgccgagaggctgctgcgtaacaagtgagtaaggacctgtagaacgggcatgaagtttatcgtcaaccatgtgagccagtttgatcatgtacatgattccgactgatacacggttgtcgaacggttctcccgtacggccgtcataaagaactgttttagcgtctcttgacatgcctgcttcttcaagtgtttcccacacatcttcttcacgcgcgccgtcaaatacaggtgacgcgatgtgaatgccgaggtagcgggcagccatacccatgtgaagttctaatacctgaccgatattcatacgtgatggtacacccagcgggttaagcatgatatcgatcggcgtgccgtcaggaaggtaaggcatatcttcttcaggaagaatcttcgagataacccctttatttccgtgacgtccggccattttatcaccttcagaaatcttacgtttctgaacgatatatacgcgtacaagctggttcactcccggaggaagttcgtcgccgtcttcacggttgaagacttttacgtcgtggataattccgccgccgccgtgaggcacacggagagaagtatcacggacttcacgcgctttttctccaaagatcgcatgaagaaggcgttcttcagccgtaagctcagttacacctttaggcgttactttacctacgagaaggtctccgtcgttgacttccgcgccgatacggataattccgcggtcatcaaggttgcgaagcgcgtcttcccctacgtttggaatatcgcgggtgatctcttccggcccaagctttgtatcacgtgcttctgattcatattcttcaatgtgaatagatgtgtatacatcatctttcacaaggcgttcactcatgatgatggcatcctcatagttgtaaccgtcccatgtcatgaagccgaccattacgttgcggccgagagcaagttcaccaagctccattgaaggtccgtcagcaaggatttctcctttgactacttcatcgccgacacttacaatcggacgctggttgtagcacgtaccttggttggagcggacaaatttcagcaagctgtacttatccaggttgccttttactttttggccgtcaatttcttcatagcggcgcacccatacgtttttcgcttccacccgttctacgataccagggtgtttacaaataacggctgcaccggagtctttaccggatacgtattccatacccgttccgacgatcggagcttccggctgcatcaaaggcacagcctgacgctgcatgttcgctcccatgagggcgcggttcgagtcatcgttttccaagaacggaatacatgctgtcgcagcagaaacaacctgtttaggagatacgtccatgtaatccacgcggttgcgggctacaacggtgttttcccctctgaaacgcgctacgatgctgtcatccaagaaagaaccgtcatcgctcagcttagcattcgcttgggctacgacatagttatcctcttcatcagcagtcaggtagtcgattctaggcgttacttttcctgtttcaggatcaacgcggcggtatggcgtctcaatgaaaccaaagcggtttactttcgcaaatgatgacaatgagttgatcaaaccgatgttcgggccctcaggcgtttcaatcggacacatacggccgtagtgagagtagtgaacgtcacgtacttccatacctgcgcgctcacgcgtcaaaccgcccggtccgagagctgacagacggcgtttgtgcgtcaattcagcaagcgggttcgtctgatccatgaattgagaaagctgtgagcttccgaagaactctttaatagacgcaataacaggtctgatgttaatcagctgctgcggcgtaattgtattcgtgtcttgaatagacattctttcacgtacgacacgttccatccggcttaaaccgatacggaattggttttgcaggagctcacctacagaacgcagacggcggtttccgagatggtcgatatcatcagtgtcgcccactccgtgcaggaggttgaagaagtagctgatagaagaaataatatcagcaggcgtaatgtttttaatcgcctcttcgatgtaagcattgccgatcacattgatcgtctgctctccttctgcatcagtaggagcatagattttaatggattgaagcatcacttcatcctcgacaacgccgccgttaggataaagttttctgaagccgattccattttctaagtatggcaatactttatcaagtgttcttctgtcaagaatctgccctttttcagcgagaatttcaccggtttccggatccaccagtgtttctgcaaggcgctggttaaacaggcggttcttgatatgaagctttttattaattttatagcgtcctacattcgcaaggtcgtatcgcttcggatcgaagaaacgggaatccagcaagctttttgcgttttctactgtaggcggctctccgggacgaaggcgctcatagatttcaagaagcgctttgtcactgttttcggtgttgtccttatccagtgtattgcggagatattcgttctcaccaatgagatcgagaatctcttggtcggaaccgaagccgagagcacgcaaaagaaccgtaaccggcaacttacgtgtgcgatcaatgcggacatacacaacatctttcgcatcagtttcgtattctaaccatgcgccacggtttggaatgacagtcgcggtaaaaccttttttaccgtttttgtctactttaccactgaaatatacacttggagaccgaacaagctgagatacgataacacgttctgcaccgttgatgataaaagtaccggtatctgtcataatagggaaatcacccatgaagacatcctggtcttttacctctccagtttctttgttaattaaacgaaccttcactcttagcggagctgagtaagtcacatcacgttcttttgactcttcaacgggatacttaggatctcctaaactgtagtcaatgaactctagagagaggttaccagtgaaatcctcaattggtgatatgtcttgaaacatctctctaagaccctcatcaagaaaccactgataagaagaggtttgaatttcaatgagatttggtaattctaacacttcgctaatgcgagcatagcttctgcgctggcggtgtcgtccatactgaactagttgacctgtcaactgattcacccctcaaatcatgcgtattatatgtgtaataagcatctcttacgataaagaaatacttttacaagacaaaagaaaaaagggtttctaattaagaaaaccacatccaaaaacaaataccgattttattagcatttccatgtttgtataatttatacatgcactatgattatttgagcatatcatgcaaaatatatacattggcattttacaatattaacatagctgaaaattcaagtcaaactttttttgcttttatgatataatagcctttctttttttgaaccacagaaacttcgtcaaaaagctccttcagtttttcaatggcagaaggcccgccctgttttttctgtataacgatccacaattcacctgaagcccttaaatgctcagcgcttttttcaaaaatggcatggacaactttttttccggcgcggattggggggtttgtaataatagaagcaaatgtttgagcagaatcaatatttgaaaataaatcactctgataaatccgaacgttttttattccgtttttttctgcattttcatttgacagctctacggctctttcattcacgtcaatcatgtgcacggtccggtctgtaaatgcaccggcgagcgacagaccgatcgggccgtaaccgcagcctgcatccaggaagtcaccatcgatctccggctcttcaaacgcttcaattaagacacgcgaaccgaaatcaacttcctttttcgagaaaacgccgctgtcacttgtgaatgtataagatctgttccgcagtgtaaatgaccatgtctgtttatcgcttttaactgaaggtttttctgaataatagtgttcactcattattagaacctccttttttaattgcacttaaagaaaagcaaagaaaaagcccgcctcataaaagcgagcttcccctacaggcaagtgaagattacttaacttctacagaagcgccaacttcttcaagtttagctttaagctcttcagcttcttctttcgcaataccttctttaagtggttttggagtgttgtcaacaagttctttagcttctttcaagccaagaccagtgatttcacgaacaactttgataactttgattttctgagaacctgcaccagcaaggataaggtcgaattcgctttgctcttcagcagcgccgccagcagcagctccgccagctacagctacaggagcagcagcagttacgccaaattcttcttcgattgcttttactaggtcgttcaattcaagtacagttgcttctttaacggaagcaatgatttcttcgatatttaaagccatttgaaattcctccatttgttttattttagggtaaaatcagattaagcgccttgttcttccttttggtctgcaactgctttagctgcaagtgcaaggttgcgaactggagcttgaagtacgctaagcaacatagaaagtaagccatcgcgtgaaggaagttcagcaagagctttcacttcttcaacagaagatacttttccttcgataacgcccgctttgatttccagagcttcgtgatttttcgcgaactcgttaagaacttttgccggagcgacaacatcttcagtactgaatgcgatcgcattcggtccagttaagacatcattcaaaccatcaagttcagcttgttcaaccgcacggcgagtcattgtgtttttgtacactttgaactctacgttagcttcgcgaagctgtttacggagttcagttacttcagaaacgttaagtccgcggtagtcaacgatgatcgttgatttgctttctttcagtttagaagcaatctcttcaacaacaactttttttgtatcaattgcgctgctcatggttacacctcctgtagattttgtgtaacacttataccgctaggtgatcacgactgtgacgacgatttcatataaaaagcctccatgtggacatggaggctgtatatacaagcatacgtaacgtaatagctgtgatatatatacacctcggcaggatattaagcctcaacggcccctgctgtctacggtataaatgacatattatattttacaacattttgaatcatatcagaatgctgatctaaagtcaaatattattttacgttgaaagtagaagcgtctactttgacaccagggcccatagtagaagtaacggcaacgtttttcacgtaaacacctttagccgcagccggttttgctttcaggattgtatcatacattgttgtgaagttctcaacaagtttttcatcctcgaaagaaacttttccgatcggaacatggatgttaccagctttgtcaacgcggtattctactttaccagctttgatttcgccgattgctttttctacttcgaatgtaacagttcctgttttagggtttggcataagaccttttggtccaagcacacggccgattttaccgacttcacccatcatgtcaggagtcgcaacgattacatcgaattcgaaccagccttgctggattttcgcgatgtaatcagaatcaccgacgtagtctgcaccggcagcttcagcttcttttgctttttcgcctttagcgaatacaagcacgcgctgagttttaccagttccgttaggaagtacaactgcaccgcggatttgctgatcgtttttacgagggtcaacccctaaacgaaaagcaacttcaactgtagcgtcgaatttagctgtgtttgtttttttagtaagcgccactgcttcagcgacgtcgtaagctttcgcacggtctacaagcttcgcagcttcaacgtactttttaccttttttagccattttaaaatttcctccttatgtggttatagcggaataacctcccacgaataagggttgcgaacttgtgaaaactcgcaacccgacaagaaacaaattaatcctcgataacgatacccatactgcgggcagtaccttcaaccatgcgcattgccgcttcaacgtctgctgcgtttaagtcaggcattttcgtttcagcgatttcgcgaaccttatcgcgcttaacggttgccactttattacggtttggttcaccagaaccagactcaattccagctgcttttttaagcaatactgcagcaggcggagtttttgtaataaatgtaaatgaacggtcttcgtaaaccgaaatttcaacaggaatgattaaaccagcttggtcagctgtacgagcgttaaactccttacagaatcccatgatatttacaccggcttgacctagtgcaggtccaactggcggcgctgggttagcttttccagcaggaatttgcaattttacaacttttactacttttttagccacgagacacacctccttaagtccgtgatgtggtaatagggtaaaccctcccactcaaggtttcattctttatatgaatgacgaaatatcaagctagctgccttggattagtccaagacgtacctttgctatattatcattaatatatagcaatttcaagttttttcacattacaatttgtcgatctgggtaaattccagctcaaccggcgtttcacggccgaacatgttaacgaatactttcactttgctcttatcataatcaatctcttcaattgatcctgtaaagttggcgaaaggtccgtctatgactttgactgtctcattcaattcaaaatcaatgtcggttttccgctcatccatgcccatccgctttaagatggtttccgcttcgccaggaagaagcggagtcggctttgagcctgaaccggctgatccgacgaatccggtaacgcccggcgtgttgcggaccacataccaggaatcatcagtcatgacgatttcaacaagcacataacccgggaacactttctttttgactacttttttcttgccgttcttaatatcagtctcttcctcttcagggacgacaacgcggaaaattttatcctgcattcccattgattccacacgtttttcaaggttcgcttttactttgttttcataaccggaatacgtatgaacaacataccaattcttttccattctatcaggactctgcagtccttccctccccgcatttaaaaatgaagtgtaaaacaaaaaataggctcagagcctatgaatccttttttcaacacaataaaaaacccgctgaacgggttttggcaaacgatattatgatctattatagcacgtattgctgatcattattcaactattaaacgaattaattgagaaattcctgtatcaaggagggcaaaaaagataacaaaaaagataaccgttgaaatcaccgtgatcgtatagcgcgttaactctttgcctttaggccagctaacctttttcatttctttcccaacatctttaaagaaactcatcatgcgcatgtaaaagacctccacaatttaaaaagcgaacactattttgtttctaaatgagctgtatgtgaattgcaagtgctgcagtacttcttaacttctaaccgctcagccgctgatgcagagcttttcattgtcgtataattacgatttccgcatgttttgcatgccagcgtaatcttttttctcatgtcgttacaccttttcctaaacaatcatttatcttaataaaatagcacagtcagaaaaattctgtcaatatgacacagaaacccgctacagactgatttctcttatttccaaatacttttcaagcttgcgcttcacgcgctgcagggcattatcgattgattttacgtgtcggtttaaatcatctgaaatttcctggtaacttcttccgtccaagtacagaacaagcacctttctctccagatcgctcagcagttctcccattttcatttcgatatcatcaaattcttcctgattaataatcatctcttcaggatttaacgttttagcgcctgaaatgacatcaagcagtgttctgtcagattcttcatcaaaaataggtttgtctaaagaaacataggaatttaaaggaatgtgtttctgacgggtagctgtctttattgcggtaataatctggcgggtaatgcataattctgcaaaagctttaaatgaagtaagcttgtcctctctaaagtctcggatagacttatataagcctatcatcccttcctgtacaatatcttctctgtcggcccctattaaaaaataagaccttgctttcgcccgtacaaaattacggtacttcgtaatcaagtaatctaacgcatcactatccccaacatgaaccttttcaatgacctgctcgtcctccaactggcaaaattgcactttgttgaactttcccttgctgttctgtagattcactgcgatccccccggcgcacgtagatagaaatattatacattaatgggcgaaaaagcgtcaacctaatccagaccgcctcggcgccacttttcaaacgttttcaaaacctcttcggacagctcgattttacccggtggtttttcagaagtgatctttgaaacccgcctttgaatccgccgttctatcgtatccacttccctcagaagctcccgggcggatttgcggagagccccttgtccgaaaatcgcccactgctccgtataatcggaggttgcgacatgaatctgtgtcgcaatattattcagcgcctgggcaagtttctcgatccgctcatccgccgtctcattctcccgtgtaaaaatcacttcgactctgtgattcgtttgttttttctctatgccttttaccagatgtgcgtcaaacaccacaatgactctgattcccgtgtaggactgatattccgccatcttctggatcagtacatctctcgcttcttcaaaactgttcgcttttaaatcctttagctgcggccaagctccaatcatgttgtatccgtctactaacaggatgtccatctgtcattattcccctaaaggattgcgcttccggtagacttcatacatgagaaggccggccgctaccgacgcattcagagacgtgacttttccggccatcggaagtttaatgagaaaatcacatttctctttcacaagccggcccattcctctgccttcgcttccgataacgagcgccaaaggcatcttgccgtccatagagcggtagtcttcccgggcggatgcatccgttccgacgacccaaatcccccgctccttcatttcatcaagtgtccgggcaaggttggtcaccttcacgacgggaatgtgttcaatcgcaccggtcgaagcttttgcgaccgtcgatgtcagtccgaccgctctgcgtttcggaatcacaatgccgtgtgcaccgacagcgtcagccgttctcatgatggaaccgagattatgagggtcttccagctcgtccaatatgagaaagaaaggctgttcgtttctctcttccgctcttttatataattcgtctaattgtgcatattcatatgccgccacctgggcgacaacaccctgatgctgcccctccaccatctgatcgagttttttcctcggtacaaattgaatggtgacgccgcgctttttagcaagctccataacttgctgcgcctgtccttttactgtgttttccgccatccataacttatacagcttgcgatctgactttaacgtctcaatcacagcgttttttcctatgacgtaatcatgttgctgactcatttgttttcctccctgacgtcccgacttgtatagcctcagcaatcagctgattcagtctttcttctcttttctcaagaaaaaggtatccgagtaaagcctcaaaagctgtactatggcggtacgtctgtacatctgtgtttttaggcgtggtccctgatttcgcgtttctgcctcttctcagcacggcttcctcttcctccgtgaaaaaggattcgtcctgaaggcggaacaatatgtctgcctgtgattttgccgatacaatccggctcgccttcttatgaaggtcattcggtttcgtaaagccctgcttaagcaggtgatgccggacgtatatttcaaaaatggcatcacccatataagcaagcgcaagaccgtttaactgctttgaatctttgatttgttcaaattgaagcatccgcttattctccccgcttccagcgagttccctgggctgtgtcttcaagaatgatattcatgcttttcagctgatcgcgaatctggtctgacaaagcgaaatcgcgattgcggcgggcttcatttctcttctcaatcaactcttcaatctcttcgtcgacaagctcttcttcgccgagcgtaagtccgagaacagatccgattctgtcaaacatgctgataaaggctttaatgacgtgatccgccgtattgtcttcctgcatgtagtaattggcgagcttcgccagatcaaaccaaacggaaatcgcattcgccgtattaaaatcatcatccattgcttcttcaaacgaagcgcggtgctcttcgattttagcgagccattcctcatcattgtcagtcagattcgtgctgctaatcaaacgatggtttaaattactgtatgccgtcttgaggcggttaaacgcgttttttgttttctcaagcagctcttccgaatagttgatcgggtggcggtaatgaacggaaagcatgaaaaatctcaaaagctgcgggtcatattgcttaatgatatcgtgcaccaaaacaaagttgccgagcgattttgacattttctcattatcgatattgatatatccgttgtgaagccagtattttgcgaatgtcttgcctgttaatgcttcagattgcgcgatttcgttttcatggtgcgggaatgtcaggtcctgaccgccggcgtgaatatcgatttcgtcacccaaatactttttcaccattgcggagcattcaatatgccagcccgggcggccttttccccaagggctatcccatgaaatttctccgtccttagcagctttccaaagcgcaaagtccagcgcatcctctttcttctcgccgacacggatacgcgcgcctgatctgagttcatcaattgattgctgagatagcttgccgtagccttcgaaggcccttgttttgaaatagacgtcgccttctgattcataagcgtagccttttttaatcagctcgctgacaaattcaataatggcgtccatgttttccatgacccgggggtgaagatccgctttccggcatccgagggcgcccacgtcttcaaaatacgctttaatgaaccgttcagaaacggtcgggacgtcctcgccgagctcgttggccgctttaatcagtttgtcgtcaacatcggtgaaattcgatacgtattgaacatcgtatcctttatactccaaatagttgcgtacggtatcatacacaatcgccggacgagcgtttccgatatgaatatagttgtatacagtaggtccgcacacgtacatttttactttgccttcctcaagaggaacaaatgtttcctttttccgtgtcaatgtattataaagtgtaatggtcatttttggttgatcctttcttttttatcttccagttcagcctgcagttcaaaaatctgctgctccaatgctctaaaccggtcagcaaccggatcgggcaagtcttggtgattgagatcgcgtttgatttttcttccgttctgaatgacgactttccccggtatgccgacaacggtcgaaaagtcgggaacatcacgaagcacaacggagccggcccctactttagaaccctgcccgaccgtaatagagccgagcaccttcgctccggttgcaattaaagcatcatcttttatggtcggatgccgcttccccttttcttttcccgttcccccgagagtgacaccttggaataccgtcacgttattgccgatttcacatgtttcccctatgacgacccccataccgtggtcaatgaaaaaccttctcccgatggtcgcgccgggatggatttcaattccggtaaagaaacgggcaatctgtgatatcaggcgcgccaggaagaaaaatctccgtttatataaagcatgtgcaatccgatgcgcccatatagcatgtaaaccagaataagttaaaacaacttcgaaatagcttcttgctgccggatcttgatcgaacactgtatctatgtcttcttttagcattttaaaaaacacatgcttccccccattctctccccgctccagtctgtttttccgcctataaaaaaagcgcctctgcatgtaaacatgacagagacgcttttaccgcgcggttccactctgtttgaaaaacaagtcaatgttttcccaacttaaaagccggtaacggcggcggccgcctttaaatactgatttccgcagaaatgttcttcaaaggtcttaagggcgcacttctaaaacatgacgcatgaatctctctcagccgatgaagattctttctgtaatggtcattgttttatactcttccctgtcaacaatcgtatatttaaatgcttttcaggcgtctgacggctgtttctctgccgatcagctcaatggcctgcggaagctccggaccgtgtgtctgaccggtaaccgctacacgaatcggcatgaacagctttttgcctttatggcctgtttctttctgaacagctttgattgaggctttgatcagctcaggcgtaaattcttcaagctcttcaagcttcgcagcaaatacgctgagcacttcaggcacctgttcttcttccagaacggcttttgcctcttgattatactcgatctcatctttaaagaacaaatcagtaagctcgacaatttcagcgccgtagctcaattgctcatggtaaagagagattaatttacgaacccattcctgttcttcggcagaaagctcagtgccgacttttcctgctttttgcaggtgcggcagggtcagctcaaccacttgatcaagatccagcgctttgacgtattggttgttgacccatttcagtttatgcatatcaaacagagccggtgacttagacaaacgatttacatcaaaaatttcaatgaattgttctcttgtgaaaagctcttcttcaccgacgggagaccagccgagaagtccgataaagttaaacagcgcttcaggcaggtaacccagctcatcatactgctcaataaactggataattgattcatcacgtttacttaattttttgcggctttcgtttacgataagcgtcatatgtccgaagacaggaatatcccagccgaatgcctggaaaatcatgatctgtttcggtgtatttgaaatgtgatcctcaccgcggagcacgtgcgtcattttcattaagtaatcgtcaatcgcgacggcaaagttatacgtcggtgttccgtcttttttgacgatgacaaagtcgccgatgccgtctgattcaaaagaaatctcgccttttacgatatcgttaaatgcgatgattttcccttccggcacgcggaaacggatgctcggctgtctgccttcggctaaaaactgctcctgctcttcctgagtcaggtttctgtgtttgccggaatagcgcggcatttccccgcgggcgatttgctcttcacgttctttttcaagttcttcttccgtacagaaacatttataagcaagccctttttcaagaagctcttcatagtactctttgtaaatgtcgttacgctcagactggcggtacgggccgtattctccgccgacatccacactttcatcccagtccatgccgagccatttcaaatagttaagctgactttgctctccgccttcaatatttcgctttttgtccgtatcctcaatccggataataaactttccgccttggctgcgggcaaataaatagttaaaaagcgccgttctggcgttaccgatatgcaaatgtccggtcggactcggtgcataacgaacgcgtacttcatttcccatgttcaaatacttcctttcatctcgtctgtagcctctagccgaatatatgtatctattctaccaccaaatagacccggcatcaaaacaatgatcaggctttttgaatcagaacggttgcctgagcggcaattccttcggctcttccggtaaacccgagcttttcagtcgtcgtcgcttttacgtttacttgagagacgtccgcctcaaggccttccgctatccgttttctcatagcatcaatatgcggcgccattttcggcttttgcgcaataatcgtgcagtctatatttccgagtacgtaccctttttcttttacaatgttccagacatgctgaagcagcttaaaagaatcagcatccttgaattccggatcagtatccgggaaatgcttgccgatatctccttcacctgccgctccgagacacgcgtctgcgactgtatgcagcaatacatcagcatctgaatgtccgagcagtcccttttcataaggaatttcaattccgccgatgatgagcggacggccttccgttaattgatgcacatcaaatccttgtccgattctaaacattatgattcccactttccgctttcatgattgcttccgcaaatatcaggtcatccggcgttgtcagcttaatattggtatagctgccttcaacgatactcacctgatatccatcaagacgctcgacgaggctggcgtcatccgtacctaagaagcctttgttttccgcttccatatgcgccgtcttcaataaagaaagacgaaaagcttgcggcgtttgaacggcccacaagcttgaacgatcaaaggtctccgcagcccgggagccttccgcccgttttatcgtgtctttcacaggaacagccaggacagccgctcccgcctcctctgctgtttcaacgagcttatcgatatgctgatgtgtgacaaacgggcgcgctccgtcatgaacaagcacgaccgattccttatcaatcactttcagtccttcgtatacactgtgctgacgctccgcacctccggtaacaagctcaatttccgtctgaatcggaaattggaccagcagctggcgaaaatcttcccgttcactctcgtttatcaccaggattattttctgacagggtgcgtggctttcaaaaacccgcagtgtgtgtataataacgggcgcaccttttaagctgatgaacagcttatttttcccggccttcatccgttttccttgtccggcagccggaataacgacaacatactccatatgaactccctcttaaagagctttctcaagcagcttgggcttggcaaaaatcattcgtcccgccgctgtctgcagtacgctggttacgagcacatcaatatgtttccctatataattgcggccttcttccacaacaatcattgtgccgtcatctaagtaagccacaccttgattatgctctttcccgtccttaatcacctgcacattcatctcttcgcccggaagcacaaccggcttcaccgcgtttgcaaggtcattaatattcagtaccgcaaccttttgaagctcgcatactttatttaaattaaaatcattcgtcacaacgacaccggatgtcagcttcgcaagtttgacaagcttgctgtcaacctcctgaatgtcttcgaagtcgccttcataaatttcaaccgtaatatccagttccttttgaatgcgattcaagatatccagtccgcggcgtcctctgttacgttttaaaacatctgaagaatcagcgatatgctgtaattcctccagcacaaattgaggaatgacaatgacgccttctaaaaagcccgtctgacaaatatctgcaattctcccatcaataataacacttgtatccaagattttcagccttttatcctgttcttcctgctcctcatcagcacttccctttttcttctgcattcttgcagaaatggagaaaagactgatcagttcatcctttttcttaaatccgacttggaagcccagataaccgagaaagaaagccagaaagaccggaatgatggtgctgaatatacggtacggaatattgtccagcggaatcacgtttacaatgagatatgcgatgataagtccaaaaaccaatccgagactcccgaataacagatccggcaccggagctctcagcaaagaatcttcaatccattttacccaattaatcacatattctgtcgtccatatactgatgagaaaaaagataatagcaccaattgcagcagacgtatatgcgtttgttattaaaggtatgtcctgtatatttgacagcacaaacaattcaggtattaaaaagataccgacaacgccgcccacaataatgaagaacgcctgaactattcgttttaacatacctccacctccttttaagtagcattttttcagcagactgtcagagcctacaaattcagaataaacaaaaactaacaataatatacccggattccgacaggtttaagcgatacttaaagctgtctatctatatagtgtttttcctgaaggcgttttaagccttttttgattttttgggcgcgcacttcgccgataccctcgacatcatcaagctcttctacagtggcttccgttatgctgggcaaaaatccgaacgcctcaaccacattttcaacaatcggcatcggcagacgcggaattttgttcagcagcctgtagcctctcgggagcacataatcatcaagattcgtagaagccgggtatccaagcagtttaaacagaatggaatcatccagcagatcatagctggacatatcctggagctcttttaacagcacgaacggatctttgattttttctttgacatagtctttgatgaaaagtgccgcctcttcttccatgtccgtaatcagttcaatcacctgcagacggattaagtgtccttccgttccgagttctttaatatacatattgatttcattttttattcggagcaccatttcataccgatgcatgacagacagcacgtcactgaatgtcacaagctcctcaaactctaatgcgtttagagccgtaattgttttgtctaaaatggttttatacttctcgagcgtttgaatggcctgatttgcctttgttaaaataaaacctatgtcctttagtgtgtacttcatgctgtcctgatataacgtaatgacatttctgcgctcagaaatggcgatgacgagacagccggtctgcttcgccacccgttccgccgtacggtgcctcattcccgtttctgaagaagaaatggtcgcctccggcataagctgtgtattcgcataaagaattttctggccggaatcacttaaaataatggcaccgtccattttggccagctcgtataagtgagcgggcgcaaatgatgtattaatatgaaaaccgccatcgacgacttgctttaccttatcattgtatccgacaacaatcaggccgcctgtatttgcccgaagtacattctctatcccggctctgagcggggtgcccggtgcaacgaactgcagaattgcagacaggtcaagctcttgtttcgccccttttttctctttttccatctattatgatcctcctaatgaagtacgaagcgcttctgcaacatttgctactccgacaacctcaatcccttttggtattgtccacccatctgcattcgcctcaggtatgatcatgcgcttgaagccgagtttcgccgcttcttttacgcgctgttcgattcttgacaccctgcggacttctcctgtcagtcccacttcaccgataaagcaatctgcgggattcggcggtgtatctctgaagcttgaggcaatgctgacggctactgccaaatcaatcgccggttcatccagtttgaccccgccggcgacttttaaatatgcatcttgattttgaagcaaaagacccacccgcttctcaagcacagccataattaacgataccctgttgtggtcaatgcctgtagccatgcggcgcgggtttccaaaactggtcggtgatatgagcgcctggatttcaaccagaatcggtctcgttccttccattgacgcaacgatactcgaacccgatgccccggcagaacgctcttccaagaaaatttcagaagggttgagcacttccgtaagcccctcttcccgcatttcaaagatgcccatttcatttgttgagccgaaacggttttttacggcccgcaaaatacggaatgtatgatgccgctctccttcaaagtatagaacggtatcgaccatgtgctcaagcaatctcggccctgcgatcgatccttcttttgtgacgtgtccgacgataaaaataggtatgccgtttgttttcgcgattttcatcaattcggccgtacactctcttacttgtgatacactgccgggagctgaggtgatatcactttggtaaacggtctgaatggagtctacgacaacaaatgcgggtttcatctcttgtatagcagacgaaatatactccatatcggtttcagataaaacatgtaacatttggctgttgatgccaagtctgtcggcgcgcagcttcgtttgcttcacggattcttcccctgaaatgtaaagcacgctgccggccgtatctgctaattgtgcggatacttggagaaggagcgttgattttccgatcccgggatcgccgccgatcaatactaacgagcctttcacaacgccgccgccaagcactctgttgaattcttcgagctttgtttgaacgcggggttcttctgatgtttcaattgatgtaatgggtgatggtttctggacggtttgaacggagtgggagaaagccgcccgccgattcgccggcgctttttttatggtttcttccaccattgtattccaagccccgcagcccgggcactttcccatccattttgcggattcataaccgcatgagtggcagatgaattttgtttttgatttagccatatatgttgtaagacctcttccttatcgaatatttctctatataacaaagtgaggcatacactcgcttacgtatgcctcatgtttgtcactatattagttcgttttagcagttgtttttacgacaaattcgccgtcctcaacatcaagaacaatgtgttggcctttatcaatattgcctctgaggagttcttctgataaccggtcctccacatgcttttgaatcgctcttcttaacggacgtgcgccgtattccaaatcgacgccctcttctgctacttttgctttggcagcatccgtcagctcgatagagagatcttgttctttcagacgttttgttaactgatcagacataagcgacacgatgtctgtaagatgttttttctcaagggagtggaagacgataatttcgtcaatccggttgataaactcaggtctgaaggcacgcttcaactctcccatgactttgtctttcatgtctttatggttttgtgattcatcctggacattgaagcctacatatttgttgcgcttcagctcgctcgccccgacgtttgacgtcataatcaggatcgtgttgcggaaatccacagtgcgtccttttgaatcagtcaagcgtccgtcttcaagcacttgcaggagaatgttaaacacatcagggtgtgctttttcaatttcatcaagcaatacgacagagtaaggttttcttctcactttttctgtcagctggccgccttcatcatagccgacatatcccggaggagaaccgacaagacgtgaagtcgagtgtttctccatgtattcggacatatccactctgatcatcgcttcctcatcaccgaaaatggattccgccagcgctcttgccagctctgtcttcccaacgcctgtagggcctaagaagatgaatgaaccaatcggacgtttcgggtccttcagtccggctcttgcacgtctgacagcctttgccacggctacaacggcttcatcctggccgatgacgcgggaatgcagaatgctttccatattgagaagcttatctgtttccgtttgggcaattttagatacgggcaccccggtccagctggatacaaccatcgcgatatcctctacagaaacttcggagttctcctggccttgtttttctttccaggtttttttcgtgtcttccacctgttctctcaggcgctgctccgtatcacgaagggaagccgctttttcaaactcctggctctgaacggcagcgtctttttccttgcgaacttcatcgagtttctgctcaagctcttttaagttcggaggcgttgtgaaagaacggagacgcacttttgaaccggcttcatcaattaaatcgatcgctttatccggaaggaagcggtcagaaatataacggtcggacaatttaaccgcggcttcgatcgcttcatcggtaatggatacgcggtgatgcgcttcatagcggtcacggagcccttttaaaatttgaatgctttcatcggctgacggctgatccacctgaatcggctggaaacggcgctcgagagccgcgtctttttcgatatatttacggtattcatcaagcgttgtggcaccgatgcattgaagctctccgcgggccagtgaaggttttaaaatattcgatgcgtcaatcgcaccttctgctccccccgctccgatcagtgtatgcagttcgtcaatgaataaaataatattgccggcctgacgtatttcatccattacttttttcaagcggtcttcaaattctccgcggtatttcgtaccggctacaaccgtacccatgtctaacgtcattacgcgtttatcacgtaaaatttccggcacttcattattgatgatctgctgtgcgaggccttcagcaatcgcagttttacctacacccggttctccgataagaacgggattatttttcgttctgcggcttaatacctcaataacacgctgaatttctttgcttcgcccgataaccggatcaagactgtcttccttcgcaatcgcagttaaatcacgcgccagactgtcaagcgtcggcgtgtttgcattgctgttggtaccggatgcagaagaccccgtctcattgcttcccagaagctgcagcacttgctgtctcgctttatttaagctgacaccgagattattcagaactctcgccgccacgccttctccttcacggatcaatccgagaagtatgtgttctgttcccacataagaatgtcctagctttctggcttcatccatgctgagctcaatgactttttttgctcttggcgtataatgaatcgtttgagacatttcctgtccccgtccgattaagctctccacttctttctgaattttatccgaaccgagtccgagtgcttggagtgctttagccgcaatcccttctccttcacgaaccagacctaataagatatgttcagttccaatattgttatggcctaagcgcagtgcttcctcctgtgccagtgccaataccttttgagctcgctctgtaaaccttccaaacatcatatcgaatcatcctcctgtctatttgcactcatttctaaatgcagcctttccctgataagcgccgctcttctcgcgtctctttcgttcggccgtaatgcaccgcccgaatattgctggagaaaacccggctgtgtcaaaatcatcagttcattaagtatattgcttgatagccctttgatgatcccaaggtctatccccagccgaacgtcagaaaggcatttcgccgtttcctttgattcaatcatacggcagttggataaaacgccgtaagatctgaatacccggtcctccaattcaattttcgaagtttggtaaagcgcttctcgggctgaacgttcctgctcaatcagctgggcagccacactgtttaaatcatctacaatgtcctgttctgattttccgagtgtgatttgatttgaaatttgaaagatatttcctaatgcttcgctgccttcaccgtaaattcctctaacaactaagcctaattggttaattgccggtataattcgattcatttgcctagttaatacaagacccggcaaatgcatcatgactgaagcccttagtcccgtccctacatttgtaggacagcttgttaagtaccctctcttctctccaaaggcgtaatccactttctcctcaatccagtcatcaacctggtttgccgcttttatggcgttgagaagctggaagccggggaagaggcattgaattctgatatgatcttcttcatttaacataatgctgacttcttcattttcagaaagcagacagccgccaaaaggagattccgttaaattcgggctgatcagatgtttctccatcagcacccgtttttccaaaggctgagcttcactcattctgattaaatgaaattgaccgatatcaggcagttccttacctgaaaaatgatcttcgaattgctgaatgatggatgaggcttcttcattcgtataccgggcgggaaactttatattttcaaagtttcgggccaaccgtatacggctgctgagtacaatgtcactttcaggtcccttttgcttcatccaattgcttagtgcgtcctgaataaaatgcttgagcgacattacccttgttccccctcactgtctgtactttttaattcctgctctaacgatcggatctgatccctgacctccgctgctctttcaaactcttcgtggtgtattaaagattcaagttctttttttaacatttccatttgccgtcttacatgcaggtttccgcctattcgttttggaattttcccggcatgcaccgtattcccgctgtgaacttttcgcaagatcggcgtaatttggctgtagaacgtatcgtaacattccgcacagccgaaacgccctgtttttctcagctgctgaaacgtcataccgcatttcttacaagctgtgccttgctctgagtagccgaacatttgagaaccggtgttttgaaatgaggactccatattcagcagtcctgataataaattatgaattgagaacccttggtttccacttatactgtatgaatcgctattttcttttgcacattgttcacaaatatgaacttcttgcttttctccattaacaactttcgtaaagtgaaaagtggccggtctctcattgcattcttgacaaatcaatcttttcacccgcttactttagttttaaagatgtgagcattgctttcatcattctggctcttagttcatcccgttcgggcaaatcaatatatagaactgaacgatccattacactcaccatcattttagcttctctttccgaaataactccgtcctctaacagtctgagaataatgtcatcagaggctgcctgggacaagtgggtatggatctgcgaaataatattattgatgaggacgacttcgttattcattttaattttgataatacgaatataaccgccgcctccccgtttactttcaacaatatatcctctttcacttgtaaatctggtgttgatgacataatttatttgggaaggaacacattgaaatttatcagcgatttcactgcgtttgatctctaaaatttctttgccattttgatctaatacttgtttcaagtactgttcaatgatgtcagaaatattatgtcccactcaaccccctcctttattgactttgactatatttgactttaatcttactataaggtgtttcgcaaaatttttcaactgtatcgctctatctctattatttccactttacacaagcataaaacctgcttttgcaaaaagccatatcgttacttttctcatactatataacgtatgcagaaaaacacaaaaaaggcagctcatgatgagctgcctttaccgtaaatatagcttggcggcgtcctactctcacagggggaaacccccgactaccatcggcgctgaagagcttaacttccgtgttcggcatgggaacgggtgtgacctcttcgctatcgccaccaaaccattgagagtgttctctcaaaactagataacagtaagcatacattcaaattggttaagtcctcgatcgattagtatctgtcagctccatgtgtcgccacacttccacctcagacctatcaacctgatcatctttcagggatcttacttccttgcggaatgggaaatctcatcttgaggggggcttcatgcttagatgctttcagcacttatcccgtccgcacatagctacccagcgatgcccttggcagaacaactggtacaccagcggtgcgtccatcccggtcctctcgtactaaggacagctcctctcaaatttcctgcgcccgcgacggatagggaccgaactgtctcacgacgttctgaacccagctcgcgtaccgctttaatgggcgaacagcccaacccttgggaccgactacagccccaggatgcgatgagccgacatcgaggtgccaaacctccccgtcgatgtggactcttgggggagataagcctgttatccccggggtagcttttatccgttgagcgatggcccttccatgcggaaccaccggatcactaagcccgactttcgtccctgctcgacttgtaggtctcgcagtcaagctcccttgtgcctttacactctgcgaatgatttccaaccattctgagggaacctttgggcgcctccgttaccttttaggaggcgaccgccccagtcaaactgcccacctgacactgtctccccgcccgataagggcggcgggttagaaggtcaatacagccagggtagtatcccaccgatgcctccaccgaagctggcgctccggtttccaaggctcctacctatcctgtacaagctgtaccaacattcaatatcaggctgcagtaaagctccacggggtctttccgtcctgtcgcgggtaacctgcatcttcacaggtactataatttcaccgagtctctcgttgagacagtgcccagatcgttgcgcctttcgtgcgggtcggaacttacccgacaaggaatttcgctaccttaggaccgttatagttacggccgccgtttactggggcttcaattcgcaccttcgcttacgctaagcgctcctcttaaccttccagcaccgggcaggcgtcagcccctatacttcgccttacggcttcgcagagacctgtgtttttgctaaacagtcgcctgggcctattcactgcggctctctcgggcttgcaccctaacagagcaccccttctcccgaagttacggggtcattttgccgagttccttaacgagagttctctcgatcaccttaggattctctcctcgcctacctgtgtcggtttgcggtacgggcacctctcacctcgctagaggcttttcttggcagtgtggaatcaggaacttcgctactataattcgctcgccatcacagctcagccttcacgggaaacggatttgcctatttcccagcctaactgcttggacgcggatatccaataccgcgcttaccctatcctcctgcgtccccccattgctcaaatggtgaggaggtggtacaggaatatcaacctgttatccatcgcctacgcctttcggcctcggcttaggtcccgactaaccctgagcggacgagccttcctcaggaaaccttaggcattcggtggaggggattctcacccctctttcgctactcataccggcattctcacttctaagcgctccacaagtccttccggtcttgcttcacagcccttagaacgctctcctaccactgttcgaagaacagtccgcagcttcggtgatacgtttagccccggtacattttcggcgcagagtcactcgaccagtgagctattacgcactctttaaatggtggctgcttctaagccaacatcctggttgtctaagcaactccacatccttttccacttaacgtatactttgggaccttagctggcggtctgggctgtttccctttcgactacggatcttatcactcgcagtctgactcccaaggataagtcatcggcattcggagtttgactgaattcggtaacccggtaggggcccctagtccaatcagtgctctacctccgagactcttaccttgaggctagccctaaagctatttcggagagaaccagctatctccaggttcgattggcatttcacccctacccacacctcatccccgcacttttcaacgtgcgtgggttcgggcctccattcagtgttacctgaacttcaccctggacatgggtagatcacctggtttcgggtctacgaccacgtactcaattcgccctattcagactcgctttcgctgcggctccgcatcttctgcttaaccttgcacgggatcgtaactcgccggttcattctacaaaaggcacgccatcacccgttaacgggctctgactacttgtaggcacacggtttcaggatctctttcactccccttccggggtgcttttcacctttccctcacggtactggttcactatcggtcactagggagtatttagccttgggagatggtcctcccggattccgacggaatttcacgtgttccgccgtactcaggatccactcaggagagaacgaagttttgactacagggctgttacctcctatggcgggcctttccagacctcttcatctacctcgttcctttgtaactccgtacagagtgtcctacaaccccaagaggcaagcctcttggtttgggctggtcccgtttcgctcgccgctactcagggaatcgcatttgctttctcttcctccgggtacttagatgtttcagttccccgggtctgccatctcatatcctatgtattcagatatggataccactccattacgagtggtgggtttccccattcggaaatctccggatcaaagcttgcttacagctccccgaagcatatcggtgttcgtcccgtccttcatcggctcctagtgccaaggcatccaccgtgcgccctttctaacttaaccgttaaaaagaatcactacgtgatatcttgcattacaattgaatgtgaattacttctgttatctagttttcaaagaacaacatctcgaagaatcgaatgatccttcaaaactaaacaagacagggaacgtactgtttataagacccgaggtctaatattccgttaaaatccttagaaaggaggtgatccagccgcaccttccgatacggctaccttgttacgacttcaccccaatcatctgtcccaccttcggcggctggctccataaaggttacctcaccgacttcgggtgttacaaactctcgtggtgtgacgggcggtgtgtacaaggcccgggaacgtattcaccgcggcatgctgatccgcgattactagcgattccagcttcacgcagtcgagttgcagactgcgatccgaactgagaacagatttgtgggattggcttaacctcgcggtttcgctgccctttgttctgtccattgtagcacgtgtgtagcccaggtcataaggggcatgatgatttgacgtcatccccaccttcctccggtttgtcaccggcagtcaccttagagtgcccaactgaatgctggcaactaagatcaagggttgcgctcgttgcgggacttaacccaacatctcacgacacgagctgacgacaaccatgcaccacctgtcactctgcccccgaaggggacgtcctatctctaggattgtcagaggatgtcaagacctggtaaggttcttcgcgttgcttcgaattaaaccacatgctccaccgcttgtgcgggcccccgtcaattcctttgagtttcagtcttgcgaccgtactccccaggcggagtgcttaatgcgttagctgcagcactaaggggcggaaaccccctaacacttagcactcatcgtttacggcgtggactaccagggtatctaatcctgttcgctccccacgctttcgctcctcagcgtcagttacagaccagagagtcgccttcgccactggtgttcctccacatctctacgcatttcaccgctacacgtggaattccactctcctcttctgcactcaagttccccagtttccaatgaccctccccggttgagccgggggctttcacatcagacttaagaaaccgcctgcgagccctttacgcccaataattccggacaacgcttgccacctacgtattaccgcggctgctggcacgtagttagccgtggctttctggttaggtaccgtcaaggtgccgccctatttgaacggcacttgttcttccctaacaacagagctttacgatccgaaaaccttcatcactcacgcggcgttgctccgtcagactttcgtccattgcggaagattccctactgctgcctcccgtaggagtctgggccgtgtctcagtcccagtgtggccgatcaccctctcaggtcggctacgcatcgtcgccttggtgagccgttacctcaccaactagctaatgcgccgcgggtccatctgtaagtggtagccgaagccaccttttatgtctgaaccatgcggttcagacaaccatccggtattagccccggtttcccggagttatcccagtcttacaggcaggttacccacgtgttactcacccgtccgccgctaacatcagggagcaagctcccatctgtccgctcgacttgcatgtattaggcacgccgccagcgttcgtcctgagccaggatcaaactctccgataaagtagtttgactgactacgcacatcgctgtgcgatttatttaaaactttgaattaacaggtacgttttgtcttgtttagttttcaaagatcattttgttcactttctcaagcaactttttaagtatataataagtttctcttaaagtcaacatgtttttttataaatggtggagcctagcgggatcgaaccgctgacctcctgcgtgcaaagcaggcgctctcccagctgagctaaggccccgaagtggtcgggaagacaggattcgaacctgcgaccccatggtcccaaaccatgtgctctaccaagctgagctacttcccgatttttaaaaatattatggcgcgcccgagaggagtcgaacccctaaccttttgatccgtagtcaaacgctctatccaattgagctacgggcgcataataatgaatgccgagggccggacttgaaccggcacggtagtcacctaccgcaggattttaagtcctgtgtgtctgccaattccaccaccccggcgtggatggtatagttggagcggaagacgggattcgaacccgcgacccccaccttggcaaggtggtgttctaccactgaactacttccgcatacaggataactatcctgtataatgcgggtgaagggacttgaacccccacgtcataagacactagatcctaagtctagcgcgtctgccaattccgccacacccgcgttacatggtgagccatgaaggactcgaaccttcgaccctctgattaaaagtcagatgctctaccaactgagctaatggctctttttaaaagacttgtgttattatcttgtccaaaaatggtgccggccagaggacttgaacccccaacctactgattacaagtcagttgctctaccaattgagctaggccggcaaatatggtggaggatgacgggctcgaaccgccgaccctctgcttgtaaggcagatgctctcccagctgagctaatcctccatatattacacttacgtgtaatggcttggcggcgtcctactctcacagggggaaacccccgactaccatcggcgctgaagagcttaacttccgtgttcggcatgggaacgggtgtgacctcttcgctatcgccaccaaaccattgagagtgttctctcaaaactagataacagtaagcatacattcaaattggttaagtcctcgatcgattagtatctgtcagctccatgtgtcgccacacttccacctcagacctatcaacctgatcatctttcagggatcttacttccttgcggaatgggaaatctcatcttgaggggggcttcatgcttagatgctttcagcacttatcccgtccgcacatagctacccagcgatgcccttggcagaacaactggtacaccagcggtgcgtccatcccggtcctctcgtactaaggacagctcctctcaaatttcctgcgcccgcgacggatagggaccgaactgtctcacgacgttctgaacccagctcgcgtaccgctttaatgggcgaacagcccaacccttgggaccgactacagccccaggatgcgatgagccgacatcgaggtgccaaacctccccgtcgatgtggactcttgggggagataagcctgttatccccggggtagcttttatccgttgagcgatggcccttccatgcggaaccaccggatcactaagcccgactttcgtccctgctcgacttgtaggtctcgcagtcaagctcccttgtgcctttacactctgcgaatgatttccaaccattctgagggaacctttgggcgcctccgttaccttttaggaggcgaccgccccagtcaaactgcccacctgacactgtctccccgcccgataagggcggcgggttagaaggtcaatacagccagggtagtatcccaccgatgcctccaccgaagctggcgctccggtttccaaggctcctacctatcctgtacaagctgtaccaacattcaatatcaggctgcagtaaagctccacggggtctttccgtcctgtcgcgggtaacctgcatcttcacaggtactataatttcaccgagtctctcgttgagacagtgcccagatcgttgcgcctttcgtgcgggtcggaacttacccgacaaggaatttcgctaccttaggaccgttatagttacggccgccgtttactggggcttcaattcgcaccttcgcttacgctaagcgctcctcttaaccttccagcaccgggcaggcgtcagcccctatacttcgccttacggcttcgcagagacctgtgtttttgctaaacagtcgcctgggcctattcactgcggctctctcgggcttgcaccctaacagagcaccccttctcccgaagttacggggtcattttgccgagttccttaacgagagttctctcgatcaccttaggattctctcctcgcctacctgtgtcggtttgcggtacgggcacctctcacctcgctagaggcttttcttggcagtgtggaatcaggaacttcgctactataattcgctcgccatcacagctcagccttcacgggaaacggatttgcctatttcccagcctaactgcttggacgcggatatccaataccgcgcttaccctatcctcctgcgtccccccattgctcaaatggtgaggaggtggtacaggaatatcaacctgttatccatcgcctacgcctttcggcctcggcttaggtcccgactaaccctgagcggacgagccttcctcaggaaaccttaggcattcggtggaggggattctcacccctctttcgctactcataccggcattctcacttctaagcgctccacaagtccttccggtcttgcttcacagcccttagaacgctctcctaccactgttcgaagaacagtccgcagcttcggtgatacgtttagccccggtacattttcggcgcagagtcactcgaccagtgagctattacgcactctttaaatggtggctgcttctaagccaacatcctggttgtctaagcaactccacatccttttccacttaacgtatactttgggaccttagctggcggtctgggctgtttccctttcgactacggatcttatcactcgcagtctgactcccaaggataagtcatcggcattcggagtttgactgaattcggtaacccggtaggggcccctagtccaatcagtgctctacctccgagactcttaccttgaggctagccctaaagctatttcggagagaaccagctatctccaggttcgattggcatttcacccctacccacacctcatccccgcacttttcaacgtgcgtgggttcgggcctccattcagtgttacctgaacttcaccctggacatgggtagatcacctggtttcgggtctacggccacgtactcaattcgccctattcagactcgctttcgctgcggctccgcatcttctgcttaaccttgcacgggatcgtaactcgccggttcattctacaaaaggcacgccatcacccgttaacgggctctgactacttgtaggcacacggtttcaggatctctttcactccccttccggggtgcttttcacctttccctcacggtactggttcactatcggtcactagggagtatttagccttgggagatggtcctcccggattccgacggaatttcacgtgttccgccgtactcaggatccactcaggagagaacgaagttttgactacagggctgttacctcctatggcgggcctttccagacctcttcatctacctcgttcctttgtaactccgtacagagtgtcctacaaccccaagaggcaagcctcttggtttgggctggtcccgtttcgctcgccgctactcaggaaatcgcatttgctttctcttcctccgggtacttagatgtttcagttccccgggtctgccttctcatatcctatgtattcagatatggataccactccattacgagtggtgggtttccccattcggaaatctccggatcaaagcttgcttacagctccccgaagcatatcggtgttcgtcccgtccttcatcggctcctagtgccaaggcatccaccgtgcgccctttctaacttaaccgttaaaaagaatcactacgtgatatcttgcattactaattgaatgtgaattacttctgttatctagttttcaaagaacaatatctcgaagaatcgaatgatccttcaaaactaaacaagacagggaacgttctgtttataagacccaaggtcttatattccgttaaaatccttagaaaggaggtgatccagccgcaccttccgatacggctaccttgttacgacttcaccccaatcatctgtcccaccttcggcggctggctcctaaaaggttacctcaccgacttcgggtgttacaaactctcgtggtgtgacgggcggtgtgtacaaggcccgggaacgtattcaccgcggcatgctgatccgcgattactagcgattccagcttcacgcagtcgagttgcagactgcgatccgaactgagaacagatttgtgggattggcttaacctcgcggtttcgctgccctttgttctgtccattgtagcacgtgtgtagcccaggtcataaggggcatgatgatttgacgtcatccccaccttcctccggtttgtcaccggcagtcaccttagagtgcccaactgaatgctggcaactaagatcaagggttgcgctcgttgcgggacttaacccaacatctcacgacacgagctgacgacaaccatgcaccacctgtcactctgcccccgaaggggacgtcctatctctaggattgtcagaggatgtcaagacctggtaaggttcttcgcgttgcttcgaattaaaccacatgctccaccgcttgtgcgggcccccgtcaattcctttgagtttcagtcttgcgaccgtactccccaggcggagtgcttaatgcgttagctgcagcactaaggggcggaaaccccctaacacttagcactcatcgtttacggcgtggactaccagggtatctaatcctgttcgctccccacgctttcgctcctcagcgtcagttacagaccagagagtcgccttcgccactggtgttcctccacatctctacgcatttcaccgctacacgtggaattccactctcctcttctgcactcaagttccccagtttccaatgaccctccccggttgagccgggggctttcacatcagacttaagaaaccgcctgcgagccctttacgcccaataattccggacaacgcttgccacctacgtattaccgcggctgctggcacgtagttagccgtggctttctggttaggtaccgtcaaggtgccgccctatttgaacggcacttgttcttccctaacaacagagctttacgatccgaaaaccttcatcactcacgcggcgttgctccgtcagactttcgtccattgcggaagattccctactgctgcctcccgtaggagtctgggccgtgtctcagtcccagtgtggccgatcaccctctcaggtcggctacgcatcgtcgccttggtgagccgtcacctcaccaactagctaatgcgccgcgggtccatctgtaagtggtagccgaagccaccttttatgtctgaaccatgcggttcagacaaccatccggtattagccccggtttcccggagttatcccagtcttacaggcaggttacccacgtgttactcacccgtccgccgctaacatcagggagcaagctcccatctgtccgctcgacttgcatgtattaggcacgccgccagcgttcgtcctgagccaggatcaaactctccgataaagtagtttgactgactacgcacatcgctgtgcgatttatttaaaactttgaattaacaggtacgttttgtcttgtttagttttcaaagatcattttgtctttcgttcaagcgactttattattatatcttatcaatctcttgaagtcaacaactttttaaatttctttttttcgtcagcgccttgtttagcggcaacgaataataatataccacctcacaaataatagtgcaatagtttttttaaagaaaatcaaaaagttttacgagcggcttgtttctaaaaaagcgccgtactgcgataagcagaaaacggcgccttcccttttattagcgttgtctcatttgagggaataataaaacgtctctgatagacggagcatttgttaacagcatgacaaggcggtcgataccgatacccaatcccccggtcggcggcatgccgtattcaagagcttcaacgaagtcttcatccatcatatgcgcttcatcgtttccttcttctctttcttttaattgcgcttcaaagcgttccctctggtcaatagggtcattcagctccgtaaacgcattagcgtgctcacggccgacgataaacagctcaaaacggtctgtaaagcgagggtcctccggatttttcttagcaagaggagaaatctctacagggtggccgtaaataaatgtaggctgaatgagtgtttcttcaattttttgttcgaagaattcattgatgatatgacccaccgtcatagagtttgtgatctcgataccatgctcttttgcatgaccgcgcgcttcttcaacagtcatctcattccagaaatctacgcctgtcgcttctttgaccgcatctaccatgtggagtcgtttccactcaggtttcagatcaatctgctcttcgccgtactggattgtggtgcttccaagcacttcctgcgcaatatgtgctacgaggttttccgtaagactcataatatctttataatcggcgtacgcttcatacagctcgatcatcgtgaattcagggttatggcgtgtagaaacaccttcgttacggaacacgcggccgatttcgtagactttttccaatccgccgacaatcaggcgtttcaggtgcagttcaatcgcaatacgcatataaagaggcatgtcgagcgcgttatggtgcgtgatgaacgggcgtgcagacgctcctcccggtatgctgtgcatcgtaggtgtttcaacttctaagtatccatggtcatctaagtatcttctcatcgcttggatgattttgctgcgtgtgataaacgtttgtttgctgtcagggtttacgatgagatcgagatagcgctggcggtaacgctgttcaacgtcttttaacccatgatatttatcaggaagaggacgcagtgcttttgtcagcagttcaaaagatgtcgctttgacagaaagctcgcctacgtttgttttgaaaactttcccggtgatgccgataacgtctccgaggtctgaagatttaaagatttcatattgttcttcgccgacactgtcttttcttacgtaaatttgaatttgaccttctaagtcctgcagatgcgcaaagccggctttcccttttccgcgctttgtcatcatacggcctgcaatggtcacttcgatcgctttttcttccagttcttctttagaaagctcctggtaggcgtcaatgatttgttgagattgatgcgttctctcgaaacgttcgccgaaagggtcaatgccgttttctctcagctggttcattttatctcgtctgacttgcagctggtcgttcaattcctcatgattttgctcttcttgactcattggtatcactccgttacattttgatttcacgaaaaagcagaaaaactgccagcggtaagctggcagtgagcagcaatagagggtgtatattaacctacttttgcatcttgaagctcttttgcctctgcttcggcggtaaatgcatctaaaagctgcacaaatttttcacgcgtctcacattggttaatttcattgcgtacattcgcattgcctctgacacctttcagataccaggcagcgtgttttctcatttctctgactgccacattttcgccttttaacttaatcaggcggtctaagtgcagtttgcataccgacattttttcacggactttcggctcgtcttttaactcaccggtttcaaggtactgcaccgtacggtaaatcatccacgggttgccgagtgcggcccggccgatcatgacgccgtcaactcctgtttcctcaagcatgcgtttcgcgtcctgaggcgttttgacatcaccgtttccgatgacgggaatggagacggattgcttcacttctttaatgatatcccagttcgcagtgccttcatacatttgcactcttgtgcggccgtgaagggcaacggcttttccgccggcacgttcaacggcttgggcgtttttcaccgcataaatgtgatcttcatcccaacccattctcatcttcactgtaaccggcttatcaacagcatctactactgcggataccatttcataaatcttatcaggatcgagaagccatttggcgcccgcatcacattttgtaatctttggtacgggacatcccatgttaatatcaataatatcagcagtcgtgttttgatctacaaacttcgccgcttccacaagggtttccttttttcctccaaaaatctgaaggctgagcggtttttcacgttcatcaatgtaaagcatccccattgttcttgcgttgttgtaaaggatcgctttgtcactgaccatttcagcgcataccaatccggctccgaattcctttacagtcaatctgaacgctgagttgcagacaccggccataggggcaagcacaacccggtttttcaattgaatatcaccgattttaaacatttttcccctcctttcatttgtctatttttcaggcggggccaattcgtccgcacttatatttaaaacatctgccgcatcttgaatgatggcatctgacggcaatcggtttccgcgttcaatttcaccgacaatagaaactgatatacctaatgcttttgcaaatccttcttgagtataacctttcagctttctgaatgcacgaattcgcctaccccagatttctgcttccatactcttacaccttcttggtttgtttcagcgcttatcgtgatatgatccgcctgcggacatatttcttttaacggcgcaaggacaaataagcgctcatacattctcggatgcggaacaatcagccgctctgtttcaatattttcacgattatacagcaaaatgtcaaggtctgccgtccgcggtccccagcgaatctctctcgttctgcctaattcagcttcaatggactgtgttacatctagaagttcaaaaggagataacgacgttttcacttcaaccgccatattgagaaactgatcctgatcctcataaccgacgggatctgtttcatatatagaggatatctttgacaccgtcacgccatcatgccgggtgagcatggccactgcctggcgcaaataatgttcacggtcgcccatattggaaccgaggccgatatatgccgtattgttcatgatttctttctcgtcatttctatggctactgatttataatggccgggaatcggcgggtcaggcttaacaacctttaccgtacattgctgcaccggctcaaatttctcaaggacggtgtctgcgatccgttccgcaagggtctcgaccaaattaacgggctcgccctcaacgatgccgcggcagacactgtacaattccgcatagttaatggtataagaaaggtcatccgtttttcccgctttgctcaaatccagttcggcagtcaggtctactttgaagcgctggccgagtttgttttcttcctcgaacacgccgtgatatccgtaaaactccataccttccacatatactttatccataatgcgcgcctcctttgttcagcatagcatccatcatcttagtcattcttgcgatctctttaacatcgtgcaccctcacaatgtcgcagcctttttggacgccaaggcatactgtcgctcccgttccctcggcacgttcttcagggggaaggtcaagcacacggccgatgaacctttttctcgatgtcgccaggagcagcggataccctaacccgctgaacacctccagcttgttcatgacagccagattgtcctcatagtttttcgcaaagccgatccccggatccagaatcatgttttcatctgtgacgccggcttctgcggcaatttttacgctttccatcaagtctgcaagcatatcaggaataagatcgttatagtttctttccatacgattatgcattaagataatcggaactccgtgtgcggcggctactgacgccatgtcagggtcacctttcgccccccagatgtcattaaggatagaggctcccgctttgaccgcttcgtctgccacggacgctttgtacgtatcgattgaaagcggaatgtccagctcgcttgtaatccgttctatgacggggatgactcgtgacatttcctcatcagccgaaacgagtgatgcgccgggccttgtcgattcgccgccgatatctatgatatgcgccccttcttcagccatcttcgccgcatgcagaagcgccctttccgtactgtcgtatttgccgccgtcagagaaggagtctggcgttacatttaatatccccataacgagcgtcttctctttataggacagagcgcctttttttgtatgaatcagtttaggctgttcaattgtttgctgcgccattttgttcctcctcctgtacattcattttgtttatttcctgccgatactgcttacggagcaattgcaccgttttcccgctcattccgggcagcggcacttcctctattttagaaaacgggatgatttcaagcacggagtttgtcaaccatgcttcatccgcttcaagcattgattgaaaacggaatcggccttcggtgacttctgtcccctgccgtttcaattcatcaatgacaaactgtcttgttacaccgtcgagaattcccgtatccaaagatggcgtaaagaccttgtctccttttcgccaaaacacgttggagacaatgccttccgcgacatctccttctccggtcaggaaaatcccttcaagattgggatcattcccgatctcccgtttagcgtacatgttgtttaaatagtgatgggattttaaccggaaagatccttcaggcgtatttctccggacagagagaagcctgccttctttttgaacaggcagagtttccggattgagccggttcacgaaacaaaggacggtcggcttttcataagtctgcgcggcaaatcccttatcgctgacgcctgccgagatgttaagccggacacgcgcgctgccgtcctttatgtcattgagaagcaacagtctccgaagcatatcaagcagctcctgtttgttcacctcgaatgcaatctgcagatcccgaagcgccctgttgagcctggcgacatgcgcatccggcagaaacggccggccgctgtaaagcctgaacgtctcgaacgctccgatcccgtacagataaccatggtcaaaaggagaaagcgccgcttctttctcctctatatattgaccattcaaatatataatcacaccgatacttcctttttgcggtgtgtctctataaagtttctgagcatctctttgccgaaggaggtcatgatggattccggatggaactgaacaccttcaacaggcagctcattatggcggatggccataatttctccttctttggtttgagcggataccgtaaaacaatccggcagcgtgtccgctttgacaataagtgaatggtaccgggtggcgaccagcggattttgcaggccgttaaaaatcgtctgtccgtcatgcataacttctgacgttttgccgtgcatgagccgctctgctctgacgacatcgccgccgaatacttgcgcaatcgactgatgcccgagacatacgccgaaaataggaatactgccggcaaaatgtttgatggcttcgaggctgatccccgcttcatcaggactgcacggcccgggagaaatcattaagaagtccggacccagctcttcaatctgctcaatcgtaatctcgtcattccgtctgacgatcagttcctccccgagctcacccaaatattgaaccaagttgtacgtaaatgaatcataattgtcaatcattaaaatcatctctgctcacctcgtctgattttttgtctcttcttcgctcagctctaacgcctttttcatcgcaaaagcttttttgaacgattccttgtattcatgcttcggaaccgaatcaataaccactcctgctccggactgcataaaagcatgtccgccggctgcatagatcgtccggatcacaatgttaaactgcaaatctccgttgaatccgaaccagcctatagatccagtataaagcccccgtcttgtcggctcaagctcttctataatttccatcgttctcactttgggcgctcccgtgatggtgccccccgggaacaccgcatgaataatgtctgtcgcgtcatatccgtcctgcagctctccctgtacgtttgacacgatatgcatgacgtgggaatatttttcgatcgccataaactcgttaacccgcacggagccgtagcgcgatacgcgcccgaggtcattacgctcaagatcaacaagcatgacgtgttccgcacgttctttttcgttgtgaattaattcatcagccaaagccttgtcttcagcatcgtcttttcctcttgaacgcgtacccgcgatcggtctcgtttcaagcttcttccccttctttgtcaccaatagctccggcgacccgcatatcacttgaaaccccggtgtctcgagataggccatgtaaggagacggattgacgtttcgcaagtgtttatacacctcatacggatgaacggataaagactgagactgcctgatggacaaattaacctggaacacatccccgctcgcgatatattgtttaatttgttctacagcctgtgaaaatccttcctcggtgaacggagcggcgtacgatccgtccccattccgattcagcggtgaaaaaggctcgtccgccgtttggagggaacaccacatgtcctctaagccggacagcttttcttccgcaagatccgcttcttccgcttcagtatgggtaatgagccataacgcctcttcctcatggtcataaacggccacatcatcaaaaacaagaaagtaaatatcaggtgtttccagatcatctaacgacagcatcttaaaattctcaatatatcgggcatagtcgtaactgataaaaccaatcgcaccgccctgaaagtccggaaactcaacgtttgtttccgttccgagcgttccaaaccattcatgaaaggcccgcagcgggtcaccttctttaaacagtgtttctccctcatgcttgatcgttgtaattccgtctttccctctgacggacgcaatcggatctagaccggctatactgaatcttccccctctcgcgctttcgagcagaacatgccgttttctcgatttcgaaaggttttcatatcgctgtaaaaatgcttgtttcgtaaaaggtatttttcttcctgccggtctgcgttgtgccatcatatcaatcctctgcttcgttttactgtagttttattttaaagcaatcacactggtgaaaaaagtgaatttcacttccaaccataaaattcgaaacgttttttggattttcgatacttcaggcacaaaaaaactcccggatacagccgggagccgtgtgtatgtctctattcaaactgataaagcggtgtgcttaagtaacgttctccgttactagggatgatcgcaagcactttcttgcctttcccgagttttttcgcgatttccagtgccgcgtaaatggccgctccggaagaaataccgccgagaatcccttcttcttttgccgttttacgggcatattcaaatgcatcctcgtttttgacgggaatgatttgatcatagatgtccgtattcaatgtttcagggacaaatcccgctccgataccctgaattttatgcggacccggttttccgccggaaagaactggagaatccgccggctctaccgcatagattttgatggatggatatgcttttttcagcacttcgcccgctcccgtgatggttccgccggtaccgattccggccacgaacgcatcaagctggtcgtcaccaaactgttctacgatttctttccccgtcgtttggcggtgaatttccgggtttgccgcattgttgaattgctgaggcacaaagtatccgtgttcctccgcaagttcttccgcctttttaatggcgcccttcattccttctgcgccgggagtcagcacaagctccgctccgtatgcgcgcagcagattgcgtcgttccatactcattgtatcaggcataacgagaatggctctgagacctttagccgctgccaccatcgcaagaccgattcctgtatttccgcttgtcggttcaatgattgtgtcgccggcttttaattttccttctttttcagccgcttcaatcatcgccgctccgatacggtcttttacgctgctgcccggattcatgtattcaagcttcagatatacatctgcactgttttcatccgtcaggcgattcaatttcacaataggagtatttccgattagttcagtaatagaatttgcaatacgcaccatgttggacacctcaatttccgactaaatttattggtattataaatataagttatcaatttcaaaattttttgtcaatcatttagttcttttttccccgtagaaccaagagacccccgcctctttccacagcgttttgactgtcgccttgtcacctaattgatccatcgcgatctggcgtctgatttgactcttcacttcattgtatgagaaagttctcgctttaagcttttctttcagctgaatgacggcatatcctgaagaaactttaatcggttcagcggaccattcatcttctttgagatttttagcttctgtgatatatgcctgcgggatattttcctggttttctgtcacaaagccgaggtctccgccatactgagacgtgtatctgtccgtggaacgctcagcggcgacggcttcaaagctggaaccgcctttcaaatcagcaagcaccctgtccgcctcttccttgtttttgacgacaatgtgcctgattctgtaggaatcatcgaaatggtacagttctttatttttattataaaatgattgcatttccttatccgatatatcgatgtccttcgtcagcagttcttcaagaagaatgttgtagcggatctggtctctccattctttttcggtaatatggctgtcttcataaaatgaattattcaccgctttgattaaaagaaattcacgttccaattcggtgtttgaaactgtgagtttattctttttcgcaagttcttccactacttgtgcattaatcatatcctccagagttgattttccgtactcgtcttccatctttttcatccagtcctgccgtgtgatatgtttatcaccgattgtcgcgatggattcttcagatgaccccgcggcttgggattttgttaacttatacgccactgctacactgcataccaacagcgccgctacaataatcgtcaaaagtgttctcgatttcaaaatctaccccatcccttttacaaaatagaacaacccgctaaagagctagcgggttgtttcgtcacgaagctcttccagttcttcttttgtaaataaatatttctcattacaaaaatggcaaaccgcttcggcttttccgtcttcttctatcatatcttgtatttcttttttgcctagtcctaaaatggccgtttcgaatcgatcttttgaacaagaacagtgaaatttgaccggcattgtttcgagaacgtccggtttttgacccagaacttcttctaagatttcttccggtgtcaggcctttttgaatcaattttgaaatcggttcgatttgagataattgcttttcaattgttgaaatggtttcttcatcagtccccggaagaagctgaatgatgaacccgcccgcagcgagaatcgtgttatcaggatttactagtacacctaccccgacagatgaagggacttgttcagaagaaacaaggtaatacgtgaagtcatcaccgagttcacccgagacaatctctacttgccccgtaaaataatcacgcaagcccaaatcttttacgacactgagtgttccgtcagttccgaccgcccgtctgacatccagtttcccttgttcattgaggtcaaaatgaacgtgcgggtttgatacgtatgctcttacctcaccctttgcgttcgcatctgcgacaatggctccgatcgggccgccgccttctattttgactgtcagcttatcttcacccttaagcatcgctccgagcatcagagacgctgtcatcgtccggccgattgcggctgatgccgtcggccacgtgtcatgccttctttgcgcttcatttaccatatctgtcgttctggctgcataagcccgcactttaccgtcatatgcaattgctttaattaaataatccatcgtttacctcctatatgtgacccacgcgatttcgctcataaatgatttccagcccttttaaagtaagaaacgggtcaacaatatcaatacagtctgattcgtttgcgattaatgacgcaagcccccctgtcgcaatgactttcggttcttgtttggcctgccatttcatccgctttacaatgccttcaacttgtccgacatagccgaaaaggatgccggactgcatggcgcttaccgtgtttttgccgatgatattatccggtcgggcgatttcaattctcggaagcttggccgcgcgtgagtacagcgcttccgttgaaattgtaatgccgggagcaatcgcaccgcccatgtattgtttgttttcatcaatgtagcaatacgtcgtcgccgttccgaaatcaacaacaattaaggggccgccatactgctggatcgctgcaacggcattgacgatcctgtcagctcccacttctttcggattgtcatattttatatttaaacctgttttcattcccgggccgacaacctgcggctcgatgtgaaagtattttgtgcacattctttctaaagagaacataatcggcggcactacggatgagatgataatcccttcaatctgttcaaacatcagtccggaatgttcaaataaggagcggagcagcatgccgaattcgtcttctgttttgtgcctgctcgtttctatgcgccaatgatattctaattccccatcatgatatacaccaatcacggtgttggtgttccccacatctataaccagtaacaacctctatcaccacttttgaatagtttctaatcataacattttcaacattctacaataccatacacgatctgcggctcttttgtaaacaaaacggaaccagtaaaaaaaccgccggtatacgccggcggttttcatatcagaaagcgaactattctttcggctcgtctttcttttcgtcttctgttttagacaggatgtttactttcacatcgtctttttgaagatggtcatctgagaaattgcgctcagggagttttccgtgatccacgagatgcttgatttgttccgcatctaatgtttccacatcaagcaatgtctgagcaatcaattcaagcttatcgcgattttcagtcaggatggttttcgcacgctcataacattctttaatgatgcgctgaatttcctgatcaatttcgtaagcgatctgatcactgtagttttgctcgttgttgaaatcccggcccaggaatacttgaccgccttgagattgaccgaactgaagcggtccgagtttttctgacataccgaactctgtcaccattcttctggcaatgttcgttgcccgctggaagtcattgtgagcccccgtgctgacttcgccgaagataatttcctcggcaacacgtccgcccagaagaccgacaattttatcgagaagttcaggttttgtctggaagtaacggtcttctctcggaagcatgactgcgtatccgcctgcctgccccctcggaacaatcgttactttatgaaccatatcggcttcatccagcacaagtccgataacggtgtgaccgccctcgtggtacgccacgatattgcgttcttttttcgagatgacgcggctcttcttcgcaggacccgcaatgacacggtccgttgcttcatcaatgtcgcgcatatcaattttcttcttgttttgacgggcagcaacgagtgccgcttcgttaagaaggttttctaaatctgcgcctgagaaaccgggtgttcttgaagcgattgcttttaagttcaccgtctcatcaagcggtttgtttctcgcatgcacctgcaatacggcttcacggccgatgacatccggacggtctaccgtaatctgacggtcaaaacgtcccggacggagcaatgcagggtcaagaatgtccgcacggtttgtcgcagcgataataatgattccttcattcgcactgaaaccgtccatctcaacaagcagctggttcagcgtctgttcgcgttcatcatgcccgccgccaagaccggcgccgcgctgacgtcctaccgcgtcgatctcatcaatgaagatcaggcaaggcgcattctttttcgcattttcgaataaatcacgcacacgggaagcaccgacaccgacaaacatttcaacgaagtcagatccgctgatgctgaagaaaggaacgccagcttcaccggctgaggctctcgcaagcaatgtcttaccggttcccggaggtccgacaagcagcacgcctttagggatcctggcgccaagctcggcgaatttgcggggatctttcagaaactcaacaacctcaacgagctcctgcttctcctcatccgcgccggctacatctttaaacttcacgcgtttcttttcttccgtatacagcttcgctttgctctttccgaagttcatgacacggctgccgccgccctgagcctgattgagcaggaagaaaaacagaataaagatgatgacaaacggaatgatcgtcgttaagaacgtcacccacccgcttgtttcctgtgcgggatcaacttttacgtccgtctttttaattgcgtcaaatatctggtctgctccttttccttcaggaacatgtgttaaaaagtactggtctttgtcgtattttttcagctgtccttttacctcataaacacctctgacaggctgaaccgatacgctatcaactttcccttcatcgaggttcttgataaacgtactgtacgacatattttctgttttcgggtttgaggtctggaagtaactcacaaccccgattactactaataaaataagtaaataaaaaatggtattacggaagacccgattcattccttacctcctcccacagtaagcacaactatgttcaatagtaccatagaaaatcattccaatacaaccgataaccatctcggaagcaggcagccgatcagctttcataaatcgccggttttaatactccgatgtaaggcagattgcgatagcgctcggcataatcaagtccgtaacccacaacaaacgcgtcaggaacttcaaagcctacgaagtctgctttaatgtccgcttttcttccgcttggtttatccaacagggtaacaatcttaattgatttcgctttacgatatcggaagagttctacgagatagctcaaggttaacccactgtcgataatatcttcaatgattaagatgtcccggccttctacagatgtatccaaatctttgatgattttgacttctccggaagaaaccgtggaatttccgtagcttgatacatccatgaagtccatttccaaatatgtatcaatatgctttataagatcagccataaaaggaagcgctccctttaacacaccgattgccaacggaaacgtgtcgctgtactcgcttgttaattgttctccaagctgttttactttctgctggatctcatcttctgagatcagcactttttcgatatcctgtttcatgttaatgcttgccccctacacttttcatgctgtctatattgtaatacaatgcggtcactgtttgaaatcacaagatcgtcaaagatggattttttcaagccaggcagccagataatttcaccgctcgcatccgttacaatcggccattcgtcccgatcccgcagaggcagtttatgatcaataaatatatcttttacctttttcgagccattcatccctttaagtttaatccggtcgccgatttttctcgtccggattgttaaaggaaattgcaccttatttctgcttgtcataaaaacagcattcccatttttgatatgagggtcagcctgatcggccacctctatcataaagccgttggggagaacagcagtctcgccttccgctccttgcagctgcagctcaaagggaaccttttcacattgccattgttcaaatgtaaacaaacatgtctgatatgatttgaccaccttcagccctttcggaaaatcaagcactcccgaggcgcttccattttccgcccattccagaaactgctgtatgtggcgggcggaaaacgacgatggaacgttttcataaagatagtttaatattagttgaactcctcttctttgtaaaggtatcggaagggcaagcaattgagaggaatcgacttcaaccgatgtgtcagacttgcttgtaataaccttattcattcgttctttcgttaatgactgcaagtattgttcgtcttctgtcagtgcttcactcaccttttgaaacattttatgaacgtcaggtgattcttgttttaaaaaaggaagcacggtctttctgaatctgtttcttgtataatcgtcttttgcattgctctcatccgttctgtagctgagcccttcttgacggcagtattctaggatttcatccttttccgcatagaggaaaggcctgatcagccagccggatgcaaattcgcggacgggctgcattcccgcgagccctgcgccgagcgtacctttcgcaagcctcatgagcattgtctcaacctggtcatcgccgtgatgagccagcgccaaaaacttcgcttggtgttttgtcatcagatcttcgaaaaactgatatctgcaatcacgcgcggcagcctgcttgttcagcttattcttctttgcgtatgcagaaacatcaatctgtaccgtttcgcagaggatgtgttccgcttcgcaatatgactgcacaaacttcatatcttcttcagattcaggacccctgaactgatggtcgacatgcgccgctatgataacggaagaatgcccgaagtgcttattcagcatactgagaagcgccattgaatcagggcctccggagaccccggcaataatcgtttctccctccgcctgaagatgatatgttttgaaaaaatcttccacgcttttcacaatgtccccctcacaatgagcaggtttttttaaagatatacatatcctatcactttcattccctccaagcaaagaagaagcatgagcgcaggcgtccggccggcattagatgagaaaaaagacgatgtaagcgaaataaagggcgagaacgctgattaaaataagcgttgtttcaaacaaaccattgtgctttgcgggtttttgtttaggtttataccgcgtttgagatacagtgccctgccgcggttttgattgcggcggcttaggcttggcggcggctttccttttactcccggcgctctgccccgccgtcaggatgtcatgcttcatggcttccgcagacggatattggccgtttaaagcagaaaacagaaccttcttatacttattcagaaacgggtggccttcaatgatagaacgaagctgttctttcggctgtcctgactttttgcactctttcttctggacacagtggatcatgatcattgcgacagcaaacaggtcataggatggttctgcttttcttgttccatacccccaatagcccctgtcgtaaaactccgtatactctttaatcgcgcggccttgttttgtcgttccccctacatcaatgcagcggatggcagccggcggtccggttacaataagattttccggtttgaggtcgccaaaaacccatccctgctgatgaaggactgacaagctggaaagaagctgcaccatcagcaccggaatccactccgctcccttactgctgatatattgcggaagaagcggcccttctatgtactccatcacgtaaaaagagacatttttattcagctgcggaataaacgcatcgtccgcatcaaaaaaagaaggccccatcgtttgcgaccgggcctttgaaaaggattttaagacattcacttcagaggtaacagacatgctgtcgctgcttattttcaaagcgacctgtccgcctgatgcttctgccagatatacaataccgttagccccttttccaagctgtttgagcaatctgtaggatttgccgttccatttgccctgaattgccgtccccggtgccagactacatgccaaactcgttaaagcgtcgttcatcatctgccaacatgctccttcttgagcggattctctcaaactgctgcgtcgcttcccggatagcggggcccgtaggggtgataccgccggtcgacagcttcgcaaagagcgcagaaagggattcaagcttcggcgtccaattcagcacaagctcaacttcctggcttttcccgggaaatatacacatggcaaattcattttgtccggcccgggaatttaaactgatggaaagatcaatcagcgcttctttcaccgtcggcagtttcggcgccatactcgcactcgtatcaaccagcacaagcacctgcagatgaactgtttctccgagttcatcaaccacttccatcacttcgccgcgtttttccggagaaagctcttccatttcaacgtttttccctaagatttgtttaagctcttgattgacgacaccttgcagcgtctgggtcattgcttttttcgtcaccatttgaaccgtctgagacaattgtgacgcatatacaacttgatggacgccgccaccggccatggcgatgccttcaacttccttcattgcctcttggtcaatcgcgttttcttccataatccctataacattcaccgtaatcccctgctccttggcgaaagccgccattgcaatcgggtcttcaccatgattggagcagccatctgtaatcagcagaacttgatttaaatgtcccttattcacatacattcctcccggtgatacgattagtcccatcttcgccagaaggaaagtgatttatacgaaaggattaagaaatctcctttttattttggaataccgccggcaccggtatggaagcccatttcggcgtgttgtgatcaatccggacaacaaccaccgtcatatcgtcttcgatttggccggaacgcgttctgatgacctcttccattaatatatcagcgatttcctgcggatcttcggttttcagccctttcattttccgtttcatccacaggtcgtggttttcaacgtgcttcggtccttcaaaaataccgtcactcatcatgacgagcagatctcccgcttttaactgttcacttacaacctccacatcaaattcattgatgataccgatcggcagattgctggcctgcactttcatgacttgatctccccgcttgataaaactcggcgttgaaccgacctttaagaatttgcagcttgcatcctgaagatcaatgatagaaagatcgagagttgagtagatttcgtctgtcgtccgtaaagacagaatactgttgatcgttttgatcgctattttttcatcaatacctgattcgagaattttttcgagcagcttaatcgtttcgttgctctcataatgagccctcgccccattgcccatgccgtcactgattgcggccgcatattttctcgcccccagttccatcatgctgtagctgtcgccggagacaaggccgccgccttttgccgcatgagccgcgcctgtcgatacccggtacgatttggtcgaaccgaacgcaacatggctgtagccattcggatgagccgagtgctgttcgcttttgacaagtatctgctcctcaagaatgtcagacagcatcggggcgataattttctcactctcgccgtgtcctccgctgaacgggattgtcatttcgatatcaatattgccctgctccaagctgtatatctcgacatgctgaatctcgattccgaaatgctgaagcgcctctatcatttgttcttcctgaataaaatgctgctccctctcccgttttatttcccgagaaaagtccgccataacctcagaaacccccaacagctgctcggcaacaagcctcctgctgtcctgaacttttctcttcagtgtcagatgggcgtgatggtgggcaagttcgtcctcaatcagctcttccacctgtctggatttggaacagtgctgttgaaactcttttttcaatctgcggtttgaggcatactgcttttcttctgtttcatgcataacttgtttcattaagtcatatgttttatcaaagttttgaacccagcatttgctttttttatagcaggattggcaggaatgctcggtgattttgcttaaaaagagatccacttccccttcttccgcctgctcatcggaagacgtctgatgaaaggtggcgaagctctccgacaaggcatgaaacacattggagaactggtctactttctgggcggtgacatctctgattttcctcgcgtactgctgctgctcctgactgtgctcagcagtgcccggtatgtatcgcgccacctttttcgtaatcgattggggcgtaatcaaaaacaatacaacggcaatcaaagattcataaagagtggtcattaatccggcagacccttcaccatataatgaaatcagcagtgagccgatcaccaatccgactgcggcgccggctttctttccttctttcagcagcccgccaagaagcccggaaaacgcaagcagactcatttgatagagattcccgatattcgcaagcccgaggatcagtccggtcacaacaccgaccgtacagccgatgcttgccccgccgacaaaggaaaaactcagcacgacatagcgggccaggatatgttcagcctgcattccctgaaatgaaacaccggcaagcccggttaaaacggatgcgatcaagatcataaaacagatgatttcttctatttttaacgattgcttcacttttttgatcgtgaaaatcggcaggctttgtaaaaagatcagcgtcaaaataaaggccaggcccgcctcgacaacagccatcacataatcataggtggtaaaagcgccgctttcaaaataaacaaatccgattctcgcggcagccatagagaaaaacaccacgatcggcagcatcttcacccggtcctgcacgatatatgtaccgatttttgaaaatagagtgaagacggccaaagctgtgagaatcaataaagagtgtttcggcgaaatggttaaagcgcccgcaagtaaagacagacaagcatagaaggctttatctcttctgatcaaaagcatcgctccgaaaaacggcagtgcaaatggaagaacctcagataatatgaaagcccgtccaagtaaaaaaccgatcacgacataaatgaaacccttatagaaaaaaagtgaatgcgcttgatggactgtaagctttgccgccttttcaaaaaacgattgcagtttttccagagcttgtcccgccatcggcccgttcactcttctttccgctttttccattgctctcatcccccacctgttttattcgttgcttgtcattataaatgaaagcccagataggattttgtcaaaagaaggtaacaattccaaagaactcttcgacgctttctcccttgttcccctttccttttgtatttcctccgacatttctcaaaaagttgtctaaatatgaaaaaatcggcttctgcaacagaagccgattcgcttgatgacccgtacgggattcgaacccgtgttaccgccgtgaaagggcggtgtcttaaccgcttgaccaacgggccagatatatatggtagcggcggaggggatcgaacccccgacctcacgggtatgaaccgtacgctctagccagctgagctacaccgccatataggtgcttataagcacaagttatataatacaaaggtttcttcattccgtcaacagaaactttaaagttttaattttctgactacatgcgcgtatacaaaaaaagcacccgctgggatagacggatgctccatgtatttatagaaagcagcaagttatcctcttcttgctccgcgccctccacgttttgattccgtgtttcgttttaaagatgataagcggtcttcgctatctttaagaaacttgttcattttctgttcaaaagattctttcggacggaaatcatttctaggtctggcttgcggacggtctttagcttttttaattgataaaccaattttcccgtctttttcaacgttgatgactttcacttcaacttgatcgccgacttttaaatgctcgttaatgtcttttacataattatcggctacctcactgatatgaacgagaccggttgagcctccaggcaattcaacaaatgctccgaaatttgtaatacctgttattttcccttgcaacttgctgccaacttcaatcgacataaaaaaagtgctcctccttaggcttataaaaagatcgtttgtttaattatacctaaataaaaatttaagtgtcaacaaggctacttgctcttcttttctacattaaagagaatctcaccatttcctgacataaacaagtctcttctggcaagctctgtgacgtaatcctcatcctttaatttggaaatttcatcttttaaatcagcctgtttcgcattcaattctttaacttgtttttccagctgagcctttttttcttcgtttgcgctaagggaagaggtctgtgaccacagagaacccgctaagacaatagccgtcaacaacacaagggcgccgaatacgatcaaccgtctgaaaagccctttccgccttcttttcataagctgggattgccgttcaacctgctctttatagtcgttttgaatttcagttattgtacgttccctagatagattcaaaccagacggtcctcctttcaccttttcaaaatacgtatcatggtcgatctgattgttatgattagtttcttgctcttttgtaaaaatcctgcacttttttgaaaatatcgtttgaaagtaagacgccacttttcaggaagaagtttcaataattgtttcaacaggaaaaacagcggatacagcaaaaacgctacgatcttaaaaagacacttcgcaaaaaaggcactcacccgataggagtataaagaaataaccgtgatcagcccgatgagcagcttaaagagcagaagcaccggacggaacagcacgtgctgaatgagcttttttgcgaattggtaaagagacaccgcaagatgaatggcaaatttcagtatttttatatacattcgtttaaacaggctttggtacgtcgcaatacccagtaagacagccaagaaaatgtataccctgagttccccttcattcacgttgagcagcacatagaaaaacagcagaccttgtacaatccaaaagagaatgtcatgaatgaataacagccatctggccgttttggcgcggctgacaaacagcctgtatgtatcaagcgacgctccgagccaggcgcccataccggtcattgccagcatcgtataaaattgggtcgtcagcgtcatttaaacaacttgctaaaaaaccctttagctttatccccttgctgctcgtctaaatatacaaggtcaaacaccctgccttttatagatacaatccctttttccacatcaaggtttttcatctgcagattctcgcctctgacggaaagcattcccataaccgtttccagcaaaaactcttcgttatcaaaactttccacatgcttgacgcccgaaatgtctaaatgctttctccctttcatcgttacatcatgctgttccggaacagaagaagaacctttttgctcataatatgaattcatctattcagcccccatatcctcgatacttttagcattattactgcattgtatgaggcgggagccttgtttagaacaagcctattcgccgagtttttcttctttgacgattgtatacatgcccgcggcttcttcttttttcgttgtttctttcaattcatttaccttcacggtgacaagcttctgcccgaagcggaccttcagttcatcaccggcttttacgtctgagctggctttcgcctgattcccgttaacggtgattctcccttgatcggcgacctctttcgccaatgtgcgtcgcttaattaatctggatacttttaaaaatttatcaagtctcatatcagaatctcctctccatttcttttgcttcatcccacaatttgtccatttcctcaagtgacattgcggtcaattcaaggccctttgctgccgcttctttctcaatataagcaaagcgtctgcggaatttgtcatttgtcatggcgagcgcttcctcaggctcaattttatagtatcggccgatattgaccaatgcaaataaaacatcgccgaattcagcttttaagctgatttcatctgctgattcggcggaagcctctgcagaaaattccttcagctcttcatttactttatcccatatgtcctgaacgttatcccagtcaaagccggtttttgcggcttttttctgaagcttggcggctttcgcaagagaaggcagtgttttcggcacggcatccagcaatgaagaggatgttgtttgcttttccgcctttttgatttcttcccagttggcgacgacatcatgttcatcctgaaccttaacatccttaaacacatgcgggtgccgtctgaccatcttcgcactgatgtctctgatgacatcatcaattgagaaatacccctcgtcttctccgatctgggcgtgcagcataacctgaagcatgacgtccccgagttcttctatcatgtgatccgtgtcctcttcgtcaatggcctcaagcagttcgtagcattcctcaatcatatatttctttaatgactggtgtgtctgcttttgatcccacggacagccgttcggcccgcgaagctcgcgaataatacttcggaatgcagaaaattcctggtaaaggagttcttcttttttaatcggcggaacatacacgcttgttaagttatttatttctacattgcggtcaagttcaaacaaaggcaccttgatcatcttttctcccttgctcccggctgctgtaacgatgaccacttcatagtcgtcaggcaatttctccatgagcgtcagcttcacctcagaggccgtcatttggtcataaacctggcagatgatcaggtgatgccggagttcgagctcatccggcgtcattgtttgcgcatccgtaaattgaaacccttcaatcggatcaattcgcaacgcattaaaagtggcatccagaaagctttgccctccagcggtatgaacatctatctgttgttcttcccggcgttcaaataacagctgaacggttttctcagcgacaaacggatgcccgggtacagcgtagacgacatcctcttgcttcgctttttcaaacagaatgtccgcgatctcttcatagaccgcttcaaactgatcatgtttttcataaatatcatcaaaataccggatgtccgcttccgtctcttgctctaattccgaaatcaaagggtggtctttcgttcttatatataaatgcttcgcctgagtcagcagcttatgtacgcccactgtcaactgatccatgtctccggcgccgaggccgacgaccgtaatattacctgccatgtttttctctcctctttttcaatttgcttaaagcactgccgaaaggaagaccgctcagctcttcgtccgtgaaaatcttcattcttatcatacaataaataaacaatagccctccgatgattgacgcagacagactctcacatacagctccgcccctgctgacaggaacaaataactgccaaagcttcatgtatacgaccaaaaagaagaccatcagcagactgcaccagcacagacgggcaatcacgcctccgatattcgtcagccatcccttcgaccaaattctccggagattcaggcacgcaactgcggcaaatgccaagacggtcgccagtgccgctcctgtaataccccagccggggaccagccaaacattcagcacccatttcagcgcccctcccgccaaaacggatacggcggggaaaacggtatgtcccgctccttgcagaattgcggctgccgtaagcgcaatcgaggcaaaaaagatagataagctgaatatttgtaaggtcggcgtcccctcactgttttggaaaagcatgatattcaccggttctaaaatgcaaaaaagcccggctgatgcaccgatccctaccgcaaggcagagcttgacggcagatgacgctttctcttttatgataaacggcttgttctcatgcaccgcttttgaaattgaaggaaccaaggacgcggcgatactgacggcaaacacggttcccagctgaaggagcggctgtccgcggtcatatatgcctttcagctgtttcgcggcatggctctccgtcccgtctgaaagcagtgaatataagtttaaggcgtctacaagctgaatcaaaagcatgagtacactgctgatacagatggtgactgaataaagcagcagcttttttacaatgacggccgtttcgatatgtccgccgtctttctttgtttcttcccgcttataccagaaaacagccaatacacaaagggccgcaaagctcccggcaattgatcccgaggccgcccccgcacccgccgcgtataatgaacgcccgcttttcaaaagccagaaggataaaccgagaagcaccgccacccgaagaagctgttccgtaatctgggataaggctgacggcatcatatcatgcacgccttggaaatacccccggaaaaccgccgtaaacggaaacagtatgaaagcgaacgccgcgacccttatcagcatcacaaggcgggcatcacccataaaaccggccaacggcgccgcgccggcatacatgagcgcaaacagaacaagtccggccgccgtgacataaagggcggaaattttcattattttttgtttatgatcgctataatcgttcattaattttgagatgatcaccggaaaaccggatgttgacagcatgaccgcgatccctaaaaacggatacacctgctgataaatgtaaaatccgacgtcaccgacaatattctgaaaaggaaccctgtacacggcgcttaatatcttcgtcacgatgcccgcaacgacgagcacaaaagcacctttccatgccgattgccgcttggcgccaactgaatcgttcatccaaaagctccttccagccgctagaaaattacgtctataaaacgagcttattatatcacaatcctaacggccgaaccgatagagagcacatatgaatatgaaaaagaacagcacttgtataagagctgttctttccccgttttcttatttcaataatggtaataagacctactgctccatttgtctcgccaaaaaactggctgccgtttctaccgctttatgttctacttctccaagcgcctgttccttggaaaagatgaccacggcaccgataggatcgccatttgccacgatcggagcgattgtataggagctcatatcttcatcaatgtcattcacaagctgcgcggacttcacgtcgttttctaccactgagctgcgctgatccatcgttttttcgagcaaatcgctgatggctttattcagaaattcttttttcgaactgcccgaaacggcaatatacgcgtcacggtcgcaaatcaagacggaatggccgagactgtcatacaatgcatctgcatattctttcgcaaaatcgccaagctcactgataggagaatattttttcaatataacttctccgtcgcggtcaacgaatatttcaagcgggtctccttccctgattcgcagtgttctccgaatttctttaggaatgacgacccgtcctagatcatcaatacgacgtacgatacctgtagctttcatctctctggtgcctctctttcatgtgatgatatttaagggaaagtactaaagctctttactttatgtagcttccgccactcgcttgaaattagtatccgtcacatcaaatgtaatatacaccagagagtaacaatttttatgaagacgcgattgtttctttcttcacattctgaaggcctttcagcatgccgagcacggtctccagccactcttccgttttgcggcctttcgtctgtactgagattttcagctttttcccttccattcccagtccgatctgccggccgtatttattgccgagttcgaataatttctggccgtcaatctgtgcgctggcctcttcagaaatggtaaatctgatcgcgtctttatcctgcttgatgagttcgacgcgttcatattttccgtataccttcatctcagcaaccgtaaacagccattcaacttctttaggatagctgccgaacctgtcgatgatttcatcttggagctcatttttctcctcaattgtggcgattgatctgaagcgtttatacatgtcgattttttgcttgccgtcttgtatatagttttcaggaatatacgcgtcaagctcgatatcgatttctgtctcaaactgttcgcttttcggaatatcgcctttccgctcttcaatcgcttccttgagcatttgcgagtacaggtcaaaaccgactgagtcgataaagccgtgctgctgggcgccgagaaggttccccgctcccctgatcgtcaagtcacgcatggcgattttaaagcctgatcccagctcggtaaattctttaatcgcctgcagccgtttttccgccacctcagtaagcactttgtctctgcggtacgtaaaataagcgtaagcgacgcggttggaacggccgacccgtcctctcagctgatacagctgagacagccccattttgtctccgtcgaacacaatcaaggtattgacatttggtatatctacgcctgtctcaataatagtcgtgctgacaaggacgtctgattccccttccagaaaattgagcatgacgctttccaattcattttcggtcatttttccgtgggcatatgccacttttgcatcgggaacaagcatggaaatttcatcagccttccgctcgatgtcatccacgcggttgtacaggaaatatacctgtcctccgcgcgccagttctctttcgatagcttctcgtacaagcgcgccgttgtattccacgacatatgtctgaacagggaaacggttttccggcggcgtttcaataacggataaatcccgcacaccgagcatggacatatgaagcgtacgcggaatcggcgtcgctgtaagagtcagtacatcgacattggctttgatctgtttgattttttccttatgcgttacgccgaagcgctgctcttcatcaatgatgagcaagccgagatctttatagacgacgtctttagataagagcctgtgggttccgattacgatgtctaccgttccgtttttcagtcctttaatcgtttcattggattcttttctcgttctgaatcggctgagaagaccgatgttaatcggatagtcctgaaaacgctccgtaatggtttcataatgctgctgcgcgagtattgtcgtcggcacaagaagcgcgacctgctttccgtctgcgatcgctttaaaggccgctcggatggctacctccgtcttcccgtaacccacatcgccgcaaagcaaacggtccatcgggcgttctctttccatatcctttttaatctcctgaatggaacggagctggtcctctgtttcctggtaagggaaagcagattcgaactgccgctgcatttcatgatcgggcgagaacgcatagcctttgcttgcttcccgttccgcataaagcttaatcagatcatcggcaatatcctgaacggagttttcaacttttttcttcacccgtttccattcactgccgcccagtttataaagcttcggttcttttccttcagagccgacatacttctgcacctgatcgatttgttctacagggacatacagcttatcgctgccctgataatgaatgttgaggtaatctttatgaatgcctttgatttccagtgtttcgatccccaagtacttaccgatcccgtggttgacgtggacgacatagtcaccgacctgaagctcggaatagcttttgatccgttcggcatttgtcagcttctgctttctcggctttttcttgattcggtttttgaacagctcttcctccgtaatgacggccagcttcatcagcggcagttcaaaaccggattgcagctcgccttccatgacatagacctgtccttgcacaagcgctttggagctgtccgttttcgcggcttcaatttcgtaatcagccagcacggatgccaatctgtcggttctgtccttatttgcgcctaaaaagacgacggtgaagtttgatttcttaaagcgctccatttcacctgagaggacattcatctgcccgtgaaaactctgcatctgccggcttgtcacattcacgatattctgagggcttgtatgctggacatgacgcaaaaataatgaataataaatagccgggcgccgcttttcgctcataagctcctgaaagctgaaggataaatgaatgtcatgcagaattttcccttcctcgagcagacttgtcgtaaattcggcctcttctttttgcagctgatcctccatttcatgaatgcggctgacctcgtctaacaataacaacgtgtctgccggtgtataatctagcaaactagcaggtttttcgtaaaagtacgagagatacttcacaagttcctgatcagtctgtcccgttgataaccgttctttatcatgtgagatattgatatgaagcatttccttttgtttgtcctgcttcagctttttcagactgtcggcaagccctttatcgagcctttccattgcccgggctttttcttccgccctgatgatcaattccttcgccggtccgatcgccacatgtttgagcgtctcgattgatctctggtcatcagaattgaagcttctgatggaatcgacctccgtatcaaacagttcaattcgcaccggatgctccgacgtcagcggataaatgtcgataattccgccgcgaatactgaattcaccgggtgcagaaaccatatcggaacgctcataccccacctctacaaggcgcgcggacagctgatccggttctatatcgtctccgagtgaaatgacgagctggctgcttttccacagctccttcggcggaagcattcttctcactgccgcaacgggcgccacaacgaccggcgcttctccgtttgttaatctattaatgacatcaagccgctgagcgcgcagttcaggactcgctaccgcaatttctgaagaaatcaattcattcacggggtataaaaaaacagattgatccccgagaagcgccgtcagatcttccgtcactttttgggcctgatataaattatgggtgataaagaaaatcggccttttcgtttcctgtgcaagggcggaggtaaaaacagaacgcgcggaacctgacagacccgcaagcagctgttccttcagcccctcatgtaaaccgttgacaatggatttaaaatcatcgctttctttaataaaggtttgaatgttgtccatatgggccctcctctctattttctgcaagaacagaaaaacgctttggtctagaatctacaccaaagcttcttattgaataaatgtgttgtgttcatggtagtgcggattgcgttccagcgcctcttggcagtcttcacaaattgtaagaacatggacatctccattgtctttatatgaaatcatatcgtttctttcctcatttgttaagtgctgaaatccaagtgactgtgtcggcaccgttgaatattccaggctccctaccttaaagccgcagtggcggcagaaataatgcaaagccatacgttggacctcctgatgtgaaaaaatcatttttccctagtatggtctcccattatttatcttatacatttgcattaaattcgttcatgacttctaaaaatggtttcgttaaggaagcttcgcaggcttttacggtttttgagacggcatcattgatatgcggcgcttcttccttcgtaaaagctcccagtacatagtcaacgactttcattccgttaacggggcggccgattccgattctgacccggtcaaattcaggggttccgaggtgctgtataagcgatttaattccgttatgtccccctgcgctccccttcgtccgaagcctgatttttcccgtcggaagatcaaggtcatcgtatatgactttcagatcttcatgatcggcatcataataatccagcagcggccgcaaacattctcctgataaattcatatatgtaagcggtttaacaagtagaactttttttccggaaacaaaccccattccgtaaagtccgttgaatttcgttttattcagttcaatattccattctttagaaagctcgtcaatggccataaagccgacattatgcctcgtgttctcataggtttttcccgggttaccgagaccggcaatcacaagcatcgtaaatcctccctcaacatcgctgtaattcttctcattctagcacaaaagacgtaacctcgggcgggttacgtcttaaagcgcttattgattttctccttcgggctcttcctcaggagacggttctgcatcttcttcgaatgcttcctgcttaggaggaaggatggaagccacgacttcttccgggtcgtttgtaaatgtataattgccgtcagcagtcagatctgcgatggtcagcacatcattcatttcaagcccggaaatatcaacattaattgtctgagggatgtccttcggcttagccttgatcgaaagctcatgcagcggctgctggataacgcctccgtctttgactcctttcgcctctcccgtcagctgaatcggcacctcggcctcgagctcctcactcatattcacgacttgaaaatcggcgtgcgtcaattcgtttttgagcgggtctgtctgaagatcagtcaccataaccgattgctgatttccgttgacatcaattgtgataatcgtgttttttccttcgtcccgcaatgttttaagcaattcgacactgtctaaagagacaggcgtattcgttatttctttaccgtatataatccctggaacatgtcctgaatgacggattttccgaagcgtcgaacgtttaaaatctgttctttcatttgcttttaaagttgccatattcagcaccatcctaattatcgttttatcgtcctattagaacaatacccacaataactgggatttaaaccttaaagtttcggtttagctgaataaatagctgacagattgtttctcgtgaacgcggataatcgcttcagccagaagcggtccgacagaaagctgcttaaagcggtcgatttttttctcatcaggaagcttaatgctgttcgttacgacaagctccttgattttagagttattgatccgctcaacggcagggcctgacaatacagggtgcgtacagcatgcatacacttctgcagctccgttttcaaccagcgcgttagcggcaagtgtgattgtgccggccgtatcaataatatcatcgatcagaatcgctgtttttccttccacgttaccgacgatgttcatcacttctacctcattcggtctaggacggcgtttgtcgataatcgcgatcggcgctttcagacggtccgcaagtttgcgggcgcgcgtcacaccgccgtggtcaggagaaacaataacgatatctttcaagtctttaccttcaaagtaatggcctaaaatcggaacacccattaagtggtcaatcggaatatcaaagaaaccttgaatttgcggcgcgtgtaaatcaagcgcaatcacgcgtgtcgcacccgctgtttcaagcaggtttgcaaaaagttttgccgtaatcggttcacgtgatcttgcttttctgtcctggcgcgcataaccgtagtacggaatcacaatgttgattgttttcgcggaagcgcgctttagagcgtcaaccataatcagcaattccataatgtgctcattaaccggcgcacttgtagactgaatgatatagcaatcacagccgcgaatactttcttctatgttgatctggacctctccgtcactgaatcttgtaacagagcactttcctaattgaacccctacattatccgcgatttcttttgcaagttctggatttgaattcaaagaaaaaatctttaaattcttatctccgtattcgttagacatggtaaacctccgattttaggattattttttatgaatatttttcacataatcttctttatttacttgtcttgctctggcaatggcaagcgcttcgcccggcacatcttcagttacggttgaacccgcagcgacatacgcgccttctcccactgtgacaggagcgaccagattggagttgcagcctataaaagcgccgtcttcaatcttggttaaatattttttcttcccatcataattgaccgtgatggagccgcagcccagattcacatccgtgcccacttcggcatcaccgatatagcttaaatgagatgctttgcttcggtcgccgaattgtgttttcttgatttcaacaaagtttccgatcttcacttcattgccgattgcggaatcgggtctgatgtgagcaaaaggaccgatatttacatcattcccaactttgctgcggttgacaacggattgtttaatcacagtgcggctgccgattgaactgtcctctatctcagtgtgagggccgatgacacattcatcgccgatttcagcttgtccctttaacacagttccgggataaataactgtatcttgtccgatacgcgcgtcaggtgagatgtacgtattcatcggatcgattaaagtgactccgttctgcatatgccgtttgttaatacgctctttcatatacatttcagcctgagaaagagcgactctatcattcactccgagcgtctcttggaagttaccagtctggtaagcggcaacagtttcgccttcgtctttgaggatttcgatcacatccggcagataatactcgccttgggcattttcattcgaaacctgttcgatgacacgaaaaagagcctcgttatcaaaacagtacgttcccgtgttgatttctttcacaagacgttcttgctccgaagcatccttgtgctccacgattttttgaacggcgccgtcttcactgcggatgattcttccgtatccggcgggatcgtcggcaacggccgttaacaccgtggcttttgcacctttgtctgtatgttcattcagcatggcttccatcgtctccgccgtcagaagcggtgtatcgccgcaaataacgatcgtgacacccttttctccgtgaagaaatggttttgcctgcttgaccgcatgagccgtaccgagctgttctgcttggagagcgtaatcgcttttctgtccgagctgcttcttcacatcttcggcgccgtgtcctacgatggtgacaagcttcgctaaagataatttcagagcttcgtctgcgacgtgctctaccataggctttccgcataccggatgaaggaccttataaagcttcgatttcattctcgttccttttccggcagctaaaatcactgcaaaccgcttatccatttaatggcctccaatatcccttttatccatagaaaaatatatcctaaatagctgttgatttcaagaagacatcaaaaagtgcaagaattttctatgtaatcgctttattactgaaaaatcagatttaaaaaaggactgccggaaaaggccttgtgtcagcctttatcagcagtccttacattttgttatgtttaagaagccccggcttcttcatattctaatgcttcagaatcacccaaacgatgatactcatttaaaacagcatcctggatcttgccccgcgtgctggaattaataggatgagcaatatcgcggaattctccatcaggggtgcgtttactcggcatcgcaacgaaaagaccattgtttccatcaatcacacgaatatcatgtacgacaaattcgtgatccagcgtgatggatgcaatcgctctcatgcgaccatcggtattcacgcggcgtaatcttacgtcagtaacttccacagtagttcaccaccttttccctatataaaagcattagtctaacaattccacgattctttttaaattcctgcacgtttcaaaaagtttttttgaaaatataggatatacatacacaattaggtgataaaccatatttggggatcatatactgcataaaaaaagtgatcccggagaccggaaccacttttctgagatttaagattttaccagcgcaatgacttcaatttccacgagagcgtctttcggcagtctcgccacttccacacaagaccttgccggcttatgtacatcaaagtattgtccgtacacttcattcacttccgcaaactgctccatatcagcaataaataccgttgctttgacaaccgtctcgagagaagcgcccgcttctttcagcacagcttttaaattgctgaacacctgatgcgtttgttctgtgatatcaccgtttaccatttctccttcagcagtaagaggaatctggcctgagctgtaaaacatgttgtttacgatgattccctgtgaatatggcccgatcgctgccggcgcgtgtttcgtatggattgctttagtcatttttctgtctccccattctttaaatgctgttctttaaaaaatcgcagaaaattgccgttttgaatctcaatcgttttgtctttcatattgatggttgaaagcgtgagcagtgacatgtattcatcgacaagccgttcattcactccctcggcttcaaccaagacgcctatccccgcgacgtttgcattaaactcatcaagcaggctgatcatgccgttaatggtgccgccggctttcataaagtcgtcaataatcaaaacgttcgaacccgtagccaaacttcttttcgcaagcgacattgtttgaatgcggttagacgatcctgatacataattgatgctcaccgtggagccttcagtcactttattgtcctttcgtacgatgacaaccggaacgttcagataactggccgctgcgtaagcaagagggattccttttgtcgcaacggtcatcaccacatcaatctcccgctccgcaaaaacggaagcaaaaagcctgcctacatgagagaggacagatggttttcctaagatatccgttaaatatacataaccgcccggaaggatacgctcaggatttactaaagactgtcccagctcctgtataaacgcttctgcttcagcctgtttcactttcggaatgtatttgacgcctccggcagctcccggcactgtaagcagcgtcccaatgccttgctgttcaaaggtctgtttaataatcgttaaatcttcactgattgatgactttgctgattgataccgttctgagaaaaacgttaacggtattaattcatgcggatgggttaacaaataatttgttaagtccaccaatctgccgctgcgacgaaacttcatgaacttacccccaaaatccgaataatttaaaaataatataacttaacatacggatttaatcaagagcattctgttcgccgatcatccgcaccgcgtacacttgatcacagaaacctcttaacccgttataaatccgctgcacctttgattcgtattgaaccaaaccgaatacagtcggtccgcttccgctcattaacaccgcatcagcgccgaagcgtttcatttgatttttaatcatcgccacctcgggatggaggctgagcgtaaccgactccaatacgtttcctaattgtccgcataccttttggaagcttttttcttcaatcgcgtcaatcatcgcctgcacatcaggatgccgaacctgctgtaagttcagccggcggtacacttcggcagtcgataccccgatcgtcggtttggcgagcatgacccagcaatgaggcggagcactgatgtgcctgatcttctcaccgcgtccggttgccagggcagtgcctccgtatacacagaaggacacgtctgaaccgatttcagctccaagctctgcaagctcttcgacagaaagctttaaatcccaaagcctgttcagccctctgagcgtagctgccgcatcgctgcttccgccggcaagccctgccgctacagggatcacctttgtaatcataatcgaaacgccttttttaacttgaaaccgttctttaagcagtttggctgcctgataagccagattcctttgatcatccggaacaaagcgattatgcgacgccactctgataacgttttcgggcagttctgtcagttcaatccgatctgccaaatcaattgtcgtcatgatcatctccacttcgtgataaccatccgggcgtttactcgtcacatcgagggacagattgattttggccggcgctttttctaaaatacgcatagctttcacctacttctccatctaaacataagtatgaacattgtatcacatttggagacccggaggtacttatccgaaattgacgccggttttgacagccgatagaaaaaaccggggaacggattgtcccccgggccactgcattatcggttattttggttctgagccgccatctgctgttcggcaatctcgatcgcgcgctttaccatattcccggcgtcacgcgcccgaatgcctccccagccctcgtttttcaccgtatcgtaaaaaccaaggtccttcgccagctcatatttgaactcatctgacataactccacgacgtctgcccaaacgaaacaaccccttttatagaattgatcaccattcgtgcacgccacgataaaacatgtgacacctatagcttccgtttaatcggctgaaactttcgagggaataattagaagagctttagaaggcaaaacaaaaagcagtaaacaaaaggttcactgcccattaaaatgctactgagcttgccgcatcgtcattgaatgtcaattcaacagtctcagtcagaatatcagcataactgtatgaaactctttcaaacgaattctcgtcttgatctagttgtatcacaaaaacagaagggtacgtctcagctaaaatgcccgaacgctcaatcgtttttcggcggccgccgtttgcttttaacgtaagccgtttacctaaattcccatcaagcgatctttttatatcggacaacgtcttcgccattgcatccacctcactacatttattgtacaacaagagcccaattttgtcaaataaaatttaaattatatcaacgttaataagtcattgtcaacaaaattattttgacaaaattctattgatttctgcgttatttttcacaagttccggaaatttatgtatcaatatgtaaaataattaacccgcatagcgaaatatatgcgggttttatcactcatccatttgatttatacggcataccgacacgcagcacacccttcgtttcaattcctcccagccctttctctctcgtcagcgtatttctcaggacatcccatacattgatccgctccataaacggagtgaagctgattttcgcgacaatatataccgggtcaagcgcatgaatattgacgcgtgacggcgaacttgcgaaattcgcgcccgctctgattaaagactcaaaatgagattggcacgcccccgcgaatatgaccagctgatccaaatgagggactttacgcctcgctctctgaacggtttcgacaaagtgtttggaatgcctgtaggcgcttaaatcgttcacgcctcccttatgcttggaatatgcatcatggccggtgatgactaaaatatccggcctgtatttatcaagcagctcgtcaattgacgccggcatttttttctcatggcaatgaattccgtataccggcacaccgattttttcataaaagttcaggcactttttcaaataggcctcatcgccgtccagatgcaatacctttccgggcatatgaaagtagtgctcctgatgctgatattgatttgtcgcgtaatactcctgtttttcccgaagcagcttataatcctggcggagcagctcgagagattcattcatcctgctttcatctcttttctttctcatggcctgttcgtcttttctgacaggctccaaatcagaaaaatcagcatccgcaatcaatctgacttcgtcaccatgcaggatggcaattgaatttccgttgcttgtttgctctataccgataatgcgaaataaaacatccatttgataggatttcctggctaccatatctcctatttgaaattgcacgttacccactccacaaatagactaagcctcatcatgaaagaagtcttggcaaatgcacctctttccgctgcggcgcttgatgtttcaagcttttcttgcagttgaatgaataaggttctcctctagcctatgtagcggcagtccaagtggtgacgcaaaacaaaaagccctcttagaaaagggctttatgcaatccgttggacaagagcgcgaattcttctatggacagggattcaccgcgtcgctttccatcaatattcgtttcttgaagaacttcttcaatttgagcttttttctcttttccgcccggaagattgttcacaaggttgttcagcaaggttttccggcgctgtgcgaagcttgctttaatcagctggaagaaaaacggttcattatcgacgtcaaccgccgggccgtcacgaagcaagagacggatgacggcggaatcgacattaggctgaggcacaaacaccgttttcggtacggtcatgacggttttggcctccgtatagaactgaaccgcaatggaaagcgatccgtactccttagaggaaggatcagcggccatccgctcagcgacctctttttgcagcattacgacaattccttttaacggaagatgttcttccaaaagcttcatgatgatcggcgtcgtcacataatatgggagattcgccgtcaccataatttcatcacaatcctgaaactgctcttcaatgacggatttgacgtctgctttcagcacatcttgatgaatgatcgttacattgtcatacggagacagcgtatcattgagaatgggcagcagacgctgatcaatttcaaacgcgacgacctttttcgcccgtttggcaagctgctctgtcaacgcgccgattccgggcccgatttcaatgactccggtccgatccgtaatttccgcatggtccacaattctgtccaatatatttgtatcaattaagaaattctgtcccagactctttttaaaagagaaaccgtactttttcagaatttccttcgttctgataggtgtcgcgatatctttattgttcatcctgttcctcctgcctcatagcatcgagcgcatcaataaaatcacttcttttgatttgaaacatttgcagccgtttttgaagctgcttgccgtttgtatagccgatcttcagcaggtcgcccaatcgttcgcgccgtcttttggcagccggtccgccgatcagaccggcctgtatgacatcttcagctgaaatttcactcggctttgcctccatctcttcatgcacattttccagacatgctctgatgctttcaatggatgcgtgctcaacgccaatgccgcgcttgtttttcggtttggcaagatgtttgggcagaaatgcgtgtttacagccgggtactgcttcagaaatggttttccggatcttctcccccggaaaatccgggtccgtcagcacgatgacccctctcgtttcctgcgccagccgaatctgcctgatgacttcgtctccgattgcggaaccgtttgtctcgatcgtatccgcatcaacggcaagttttatgcgcgcagtgtcatcgcgtccctcgactactataatttctttaattttcattacttcctccaaaaaaactttttatatccaaaacgaaacctttgcttgcatgtcacgtctaatatactgaaaatacactttacctattataacgaaaaaaacagagggcgcaaaaccctctgaatgaatcggaattaatttaagatttttattttgacctgtttctttccccagcggtaagctgaagatttttcagggaaaaagacatcaatccgtcttcctttaatggctgagcctgtatcagcggctacggcatccccgtatccgtctacgtggactcttgtgccgagcgggatgacgcttgggtctaccgcaatgactttggcattcggattgcttgtcaggttaacgcctgtagccgtttggccggaacagccgctgcagcttgcggtataagccgtggaagacacggtaatcactttaccggaagatccggtttcgcccgaagatgccttcacaggtgcactgagctgctcaatcttgggactgtgccgctttgtgccgaccgcaatgatctgatctttgcttttttcagatgtttcttctttgacaagctttcttgatacttcttttccattttctttgacaacatgaaaatgctttttaagtttgccttcttttcctttttgaacgatcttttctttcccgctgtcgagagacgcatcttctttttctttcacttgatacgctattttttcctcaactacatcggtgactttttcgatacgagtgatttgtatgccggcctgattttttgtgagcttttcgtgtaatgccggttttactttatcttcgtctttcatgtccatcttatgctgcgttaaaaagtcagcgaccgtagtcgaagtcgtccatattttctttttctttcccgcatcatttacagtgacctgaaaagccgggtcgaccgtgactttcatgccgtttgtcactttcgtatctgctgctggatctattttatcgtgctgattcacaggtgtatgctgttcgttcagaaatgcgccgactgtttttgccgttgaccataaagtcttttcttctccgcctcttgtcacacggatctgctttgcagcatcatacacgacattcatgttgtctgccaatgctgtctgcttagacggggtaatccggtcttcatttctcgtctctatatgtaaatcttccagaagttccccaaccgtttttgcatgagtgcgtatttgctttttcttgccgttgatggaaacagaaactgattgttttgagagctcatgtgccccgtatgcagtcccggttccgcccagcagaataatagctgcaatcagaataaccttgcttttaccaagctttacggaaaacagttttttcattttttgtgtgatgaaaaacgcctccttctcctcggagagattatatagagtatctaaaatgctgtcaaccctcccatctcgaagatgaaaaaccttcagcgtatccctcattatgcaaaaacaaagcaaaaaaaggaagagagacatatcgacaacctatcttatgaggagaaggaagcttgtagaaccgttttacatatccactgaatcggacaagcttttacacgttatgacagcgcattctgtcagttcatgcggaaaagtctttttgcgttttcggttgtaattgaggcaatttcttcatatgtcagcccttttaattcagcgagctgttcagcaacatattttacgtagcttggctcatttcgtttgccgcggaaaggatgcggtgtcaggaaaggacagtccgtttcaatcagcaaacggtcattcggaatttcctttgctacttcttttggtttcttcgcatttttgaaggtaaccggtccgccgaatgaaatatagaaattcatatccatacactgccgtgcaacctccgtgctccccgtaaagcagtgcataatgccgccgacttcttccgctccctcttctttcaaaattgtgacaacatcttccgttgcatcacgattatgaatgataattggaaggttcacttctttggcgagagcgatttgtttccggaatacttctttctgaatgtcttttggtgatttatcccagtggtaatcaaggcccatctctccgatcgccacgactttttcgtgagaggacagttccttaatccatgataaatcttcctctgtcatgtcaattgcgtctaccggatgccagccgatcgcagcgtatataaagtcatattcctcaatcagctccatcgcacgcgtgatagtgggtttgtcgaatccgacaacgacaattcgttcaactttttcagcctttgcacgcgcaatgacttcctctaagtctgtgtcaaattgctcggcatttaagtgcgcatgtgtatcaaaaagcatcataaaaactcctttcttgttgaaaaacaaaaggtgttcgacggaatgttacacgtgaaacaccttttgcccctattatttaattcgagtgcctttcggtaatgactggtcgacagctacaactttgagaacgccgtccgattctcccgccagtatcattccttgagaaagctcgcctctcagttttaccggttttaaattcgttacacagatgatcttcattcccacaagctgatccggtgtgtaatgcttcgcgatacctgatacaacttggcgctgttcaaagcccagatcaatttgcaatttcagcagccgatctgcttttttcaccggttccgcggacaagacttctgcgacgcgaagttctgtatccataaattgatcaaacgtaatttcaggaagacgctctgcttcttgcggctcttccgccttttcttctttagcaggagcagttccttgcattttttgcttgatgtaagctacttcttcttcagcttcaagacgagggaaaagcggttccccttttttcactttcacattcttcaattggccgaatgtctgaatgctgtcccaagctttaagagactgatcctcaactccgagctgggaaaacattttttcaggcgtctgcgtcaagaaaggctgtagcaatacggccgaaatacgcaatgattcagctaaatgatacatgacagaacgtaattctttttctttttcctgatctttagcaagcacccacggagcagtttcatcaatatatttgttcgtacggctgattaattgccatagcgttgataaagctactgaaaactccatgttttccattgccttttcataagctttaaccgtttcaccggctacggaagaaagctctgaatcaaaatcggtcacatttccttcatatgaaccaatctcgccgtcaaaatatttttggatcattgcgactgtacgattcagaaggtttcctaagtcgttcgccaagtcataattaatccgttctacgaaaccttccggcgtaaagacaccgtctgaaccgaacggtacttcgcgaagcaggtaatagcgaagttcatccaagccgtagcgttcaattaacgttaccggatcaacgacatttccttttgatttcgacatttttccgtctttcatcaataaccagccatgcgcgaatacttgcttaggcagcgggagatcaagcgccatcagcataatcggccagtaaatggtatgaaaacggacaatttctttaccgacaaggtggacgtcagccggccagtactttttgtaaagctcatcattttccgtatcgtaaccgagcgctgtaatatagttgaacagtgcgtcaatccatacatacacgacatgcttcggatttcccggcacttttacgccccagtcgaacgtcgttctggaaacggccaaatcttcaagccccggtttaatgaagttgttaatcatttcatttttgcgtgattcaggctggatgaaagaaggattttcctcataaaacttcagcaggcggtctgcatatttgctcatgcggaagaagtatgactcctctttgattaattcgaccgggtggccgctgtcagggctttttccgccgacaacctcacccttctcatttcgttccacatccaccagctgtgtttccgtatagaatgtttcatcagggatgctgtaccagccctcatactcatccaggtaaatgtcaccattatcaagaagtttttgaaacactttctcgataatttctttgtgccggctttccgtcgtccggatgaaatcatcgtgagaaatgtcgagctgcttccatagcttttggatttcagcaactgcgcgatccacataagcttgaggcgtgatattctcttcctccgctttctgctggattttctgtccgtgctcatccgttccggttaagtagcgtacgtcaaatccttttaatcttttgtaacgcgccatcgcatcgcctgccacggtagtataagcatggccgatatgtaattttccgctcggataatatatcggggtcgtaatataaaaagtattattgtcttgcggcatgttgcaacctcccattcagaatgtcgaaaagctcacgcccaaaggacgagagcggttttatttgatatacaatattgatatttgtcctctatctatgataccatcttagcctttaagatcaaggatatatacgtactgcgcgtaaaagagtaaataaaattaaaaatttttattgaaattaaaaaaagtcttaacatgtcgaaatttgtcgtatataatctactaatataaaacatcttggttcgaaagtcttgatttaaaaggattttcagtaggataataggttcgaaaaagcagtcaaaaagcctgttatttcaggatttccaaggctttacttactataagaactaattcttacaaacaatagcaaacaaaaagattgacgattattggaaaccttgttatgctaggaatgtaaggaattttgtcgaataatgacgaagaaaaatataaactacaaataattatctctcgggaggagactgttaatgaaatctactggtatcgtacgtaaagttgatgaacttggacgcgtcgttatccctatcgaacttcgccgtacactgggcatcgcagaaaaagacgctcttgaaatttatgttgatgatgaaaaaatcatccttaaaaaatataaaccaaacatgacttgccaagtaactggtgaagtttctgatgataaccttaaacttgccggcggcaaattggtactcagcaaagaaggcgctgagcaaatcatctctgaaattcaaaaccagcttcaaaaccaaaaataagctatttcatacaaaaaccgttcttgttatgacacaagaacggttttttttatgattgaatgtgataagcgtcataaatctcgcgtttcggtacgtcccgatctaccgctgtttgttttatggcctgtttggaagaagatccttcatttatgtaatgctccacatgttctttctcagaaagctccgcccaccaaggcttttcctcttcatccggttcagcgccttgattgccttcgacaacgagacaaaactcaccgcggatttgatcttcatttgcccattcaagcacctcggcgatggttcctctgatgaattcctcatactttttcgttaattccctcgtgacggcgatggttcgattacccaaaacgtcatgcattgctgttaatgtttcttttaatctgtgcggcgcttcgtaaaatatcatcgtttcctgccgttttttcaggatttcgagttctttcttcttttcttttttttgtctgtttaagaatccgtagaagaaaaacggctgcggggtgatccctgatgcagtcagcgcggttaatgccgcatttgcacccggaagcggaacgacatatccgccgatttgggtgaaatctctcacaatctcagcccccgggtcggaaattgtcggcataccggcatcactgaccaatgccacattctttccgcttttcagccattcaatgattttatggccgctgctttctttattatgttcatgatagctgatgagagatgtttctatgtcataaacatggcacagctttttcgtctgtctcgtatcttcggcagctatgacatcggccgatttcagcgtctctactgcacgaaaggtcatgtcctccaaattgccgatcggtgtaggaacaaggtacagagttcccatttcagattttccgttaaaactcatctgacgtcttaacatatacagcctccttgctgcgtcgtttttcttctatatattgctcttttttctttcgggtcagctgcttaaaacggtattccgcctgcatcgcttcccgttttgtttcaaatgattccgcatggcataacgaaaccggccttctcgcccttgtatatttcgcgccctttccctcattgtgggttttcagccgtttttgcagatcatttgtataaccggcatacagactgttgtcattgcacagcagcacataaaagaaatgactatttgtctccatataaaatcgtgcggatctctttcgtatattcattttgttcattatatacaaagagcgggggaagaattttgagatcagggcggccgcctttaattccttcaaccaaaatggtattcgcttctttaccttgtttcggataaataaactgaacccgtttcggttctattcggtatgctttcattagttcaaagatttccagaagcctccccggccgatgaacgagagccgcttttcctccttgcttcagcagtttgctgctgacggaaatcacatcttcaagcgtgcaaaggatttcgtgccttgcgattctgagatgctcgttcaggttctgctccgcctctttcggtgttttaaaataaggcggattgcaggtgacaacatcatatttattatgtccgagtctttccggcatatttttcagatcatcatgaatgagactgatctgaccgcccagcccgttgtattccacgcttcgaagcgccatatcatacaagcgttcctgaatttcaactccggtgatatcggcttttgaccttgtgctgagcaaaagcggcacaatgccgttccccgtgcataaatcaacaatgttccccttttgaatcggaacgtatgcaaacttagacagcagcacggcatctaatgaaaaagcgaaaaccgtcggactctgtactattttcatatcctctgctaataagtaatccaatctttcatcatcacgtaatgaaaccataatcttattcctttcggcactctttgaaaaaggcttccgacatcagcggaagccttttccttattttttatttaagaaggacagacaaaaaaggcaatctcccttgcggacgctcccataatggacgttgcaaatatgaaagccttcttgatacagccgggccagattgtcgtacccttctcctatatcactctgctctgccttctgtgtttttgtttctttctgatcggctttgaacttctcaatttgctccgtcgtgtcatcaagccgcttacgcaaatgcttattttcaagctgaagatggtgattctcttcaatcatttcgccgatatgctgctttaagtcacccagctgacggtacagcgaaccgatttgttcctccaggtttatgacagtatcaaataactcttttttatccaaggttccacacctcgttaatctgtggtttgtgcggatacgacgccctcttccaagagctcttcccaagtatattctatcactttttcacgattcttcagttccacctgaagcacccgttccagaatattaagaccgacaacctttgcggggccgtttgccgtcgtaatcatttcgcctaaatccggcagctgttcttttgccgtctcatactcatcattttcatacttcaaacagcacatcaaacggccgcacagaccggaaatcttcgttgggttcaacgataaattttgatccttcgccattttgatggacaccggttcaaaatcaccgaggaacgtggagcagcaaagcattctcccgcatggtccgataccgccgagcattttcgcctcgtcccttaccccgatttgacgcaattcgattctcgttttaaagatagaagccaagtctttgaccaattccctgaaatcaacccgtccgtctgccgtaaagtaaaaaatgactttattgcggtcaaacgtaaattcaacatcaaccagcttcatatctaagccgtggtcagccacttttttctgacagacttcaaaagcggacagggcctcctgtttgttttcttctacaatgagaagatcgcgttcatcagcaacgcgaataacctttcgaagcggaagcacaacatcatgctcgtccacttgtttatttgcgatgacaacctgcccgtattctacacctcttacggtttcaacaatgacgcagctgtcttgttctatatcaaatccattcggatcaaaataataaattttccccgcttttttaaagcggacgcctattacgttgtacaagcttatccctcctgcaacgttaacaccaagtgctccattaatccctgcacattcacattggaatgaagccgtttttttgcttctaaaacagcgagaatttggttcgtaacgctttgttgtgtaaattgcagcgcatgctgttttattgattggaataagtcttgataaatcagtttatcttcatttccaatttggatggataatacatcacggtatatcaataagagcatatcaagacccatttcttgatgggttttttctttgaaaaagggcacccactgatcctgaatgaagaaaaaggcatgtcctttccgctgatgtaagacttcatacaattttatcactttcgctctggactctgcaaactcatcatttcgacttaattcgactgcttccgcaatattatttgtcatatttgctaagagccgggccatgtgagggctcacttcctgttcaatcagtctttcttctatggctttcggctgaagcggctggaacgggagaacctgacatctcgaaacgatggtatccagtattcggtggagctgctcagtaatcagaattgcgatggtgtcttgactcggctcctctaaaaacttcagcagactgtttgccgcatttgtggtcatttgatccgcatgggatataatgtacagctttttatgcgattccagccccgttttggaaaactcttcctgaagcgattggatctgagcctttttaatggataatccgtcgggctgaaccacatgcaggtcgggatggtttccggattcgatacgcttacagttccggcactctccgcaaggctcagtcccgtcttcaaggcaaaaaaagctttttgcgagaagcagtgcggcatccaatttgcccgtaccttttttgccttcaaacagatatgcgtgagaaagccttttcttttcaatgctgttatgcaaaagccgcatcactctgggctgctgcccggtcatttccttccatgatattgccattgtatcactctctatgtgtaaaggttaatcaataaaccttttatttctccgattcgatccagcaaatcaattgccggtttttcctgatctaacatttcttccgtcagctgaagcagtttttcatctatttctttcacaagccccagggtccggctgctgccgtacaagtcaaagcttttctccgtctcatgcgataatccgctgtctacggcctcttttacaaaacgttttaccaatcctttgaacttcgctaagtctttgaagtttctcgacttcgtcagccttttcccgaacgtttctatatccgttaagaacctgctcagctgatcaaatttcagcttgctgctttggctgtccattgaacttttaaacgttccggaaagctctgccgctttataagcaggctgctgctttttctcaataaatgtacgtaagtcagaatttattttcacgtcgtcaaatccttaaaattgatgaaattcatcgaccgggaggacaaagaccgtcgctccgccgacttccacttcgacgggatatggaacgtaggaatccgcattcccgcccatcggggataccggggcaatcatctgatcacgtttacagccattctctttaatgaggctgagcgctttatcgacacggatatcttccaccccgatcataaacgtcgtattgcctgatttaaggaatccgcctgttgtcgcaagcttcgtcaccctgaagttgtggtcggttaatactttcaaaagcctgttgctgtcctgatcctgcaccactgccactattaatttcattctctaggccccctttaggttggaaagaacattgtcgttacattcattatagcaacttatgagaaacaggtcacaactgaatttttttcaatgcttcatttatcacttgaagtgcgtcctgaatgacgagttccttctttttcgatgcgtcgattgtatggaatctttccggaaaacgctgcataaccttttggtatccttcccgtactttcgtgtgaaagtgcagagcctcaagatcgagacgattcttttctcttgaatcattcgacgtaatccgtttcaacccttcttcaggctcaatagaaaaatagatggtgacatcaggcatcgtatcgccgattgcaaactggttaatagaaagaacttcatcaatgccgagccctctcgcatagccttgataagccagcgaactgtcgatgaaacgatcacacagcacaatgcgcccttctttcaatgcaggctgcaccttttcggttaaatgctgtcttctcgccgcggcgtaaagcagcgcctccgtttttgcatccatcagtgtattgtttttatttaagatcacttctctgatctgttccgcaatgtcgatgccgcccggttctcttgtcgctgtcaccgggagcccctctgccgacagaatctctttcagttcctgaagcacagtcgttttccctgcaccttcaggaccttcaaatgttataaataaaccgctcatgatttctcctcttctatatagacaagtaattgttccccgtttaacaagccttgaatatgcgcgtccatgccgattaaacgggaaagcttctgtacgatctcttctgttatccgttcgccgtccatgatcagcggaattcccggcggataaggaataatgttccccgcatgcaagcgcccggccgccttatttatatctgcaggctcttttgtaaacttccgcatctcattttgcggatattcaagtgtcgaaatggacggaaatgtccaattcacggcatccggcaatttatcgggcggtgtattctccagtttctgctgtatgtttcttacggctgcctgttctatcatccgccggccgcctatcgacagtacgagcaatacttggtactcgtcagccagctcggcaacaatgccctcactctccaaaatgcgttgtaatgaatagccggaatgtccgagctttgaccgaagtattaattttaacgggtccgcccgcagcccatatccggaaggctcgattatttcaatagaagaaattgatgcgaaccttcgtttgattttctcaatgtgctccatatggacgggaagtgtccctttttcagcaatatcctgcacataagcacgcgccgtatctaaagatgccataatcgggtatgacgggctgctgctttgcaaactgcttacataataagttaatcgatctctgtcaattcgggtgctgtttaaatgaaagtaagatcccatcgtcatagccggaagcgttttgtgagccgattgaacaacggcgtccgcccccatagccaatgatgaaggcgggaaaggctgccctaacacaaagtgagctccatgagcctcatccaccagcacaggaacaccgtatgaatgggcttttttaactgccgcagtcaaatcggcggcgtgtccgtaataagtcggattggtcaaaacaagtcctttcgcgttcggatatgacgccagcgctttttcgatgactgaaagagatacatgtgccggcacatgcatattttcatcgatttccggcgccaaataaaccggcttggctccggccaatgccaccgcatggaaaacagacttgtgacaattacgctggatcagaatgggttcacccggttcacaaacagctaaaatcatcgccagattgccggcggtcgttccgttgacgagaaagaagctttcctgagagccgtacaatctgctcaccaaatcctgcgcttccttaatgacccctgtcgggtgatgcaagtcatcaagacccgtgatctcagtcatatcaatagataaaagagattgatatacagatttcgcttcatcaaaaaagacatctccattgtgatgtcccggaacatgaaaagaatacgtatttcggtgcgcatgcttcatcagcgctgtatataaaggtgtgtccatttttaaacaaatcctttgcctgtctttcttattatatcgtgcctgcgagccaacttaaagctaagactttttgccatctagccgttatcccggccggaactcatatcaagcagcttcttttttaaatcgccttccatgataacaagctcctcctcggcacgcctgcgtttcatcctgccttcttcttgaatagacatgatttcttcaagtgtgctgactaagctttcctgcacttttttgagggtgtctgcctcaacaagtccgcgctcattggctttggccgtctcgactgtgcttgttttcagaagttcggcgtttttcagcagcaattgatttgtcgtatccgccgccttcttctgcacatctgccgcactccgctgcctcataagcgtcagcgcgatggcgacttgattcttccataaaggaatagccgtaacaatggaggactgaattttctctgccagtgcctgattcgtgttttgaatcagacggatttgcggcgcactctgaagcgtaatctgcctgctcagcagcagatcatgcaccctcttatccagacggtcggcaaactggcgaagatcattcacttcctgtgcggccatttgattgtgttttcgtaattcggcttttcttgccacttcgggaataagctttgttttcagctcatctaattttaattcacccgctgctatatacatagttaaatcagaaaagtattgtttattttggacgtacagctgatctaaccatttattgtcactcaacagcacatttttagaatgttccagccttctgctgatacggtcaatctgcacacttgtcttttgatatttcgaaagcacttcctgcacagatccggatacccttttaaacagccgggcgaaaaaccctttgttctttacctgcagatcatcggggtttacctggtcaagcttcagcatcagatcagccaatatctgtcccatctctcctgcatcttttctttgcacgtgctctatcatcgtgtgggaaaattccagaagattcgcctgcgcctgtgaaccaaacagaacaatgctttgcatgtttccagggtccagtttttcagcgagctgaagtgccgcttctcttttttcttccggcagcgtatctgcaagctttagatgagtctggtcattttgggcgcccatactgtcgtcggaacggtctttggccatttccttcttcctttcttattttctcagtgaatgctttgccatatctaattcaaagtgcaggtcgtcgatgtcctccttcatcagttcatgaagatcttcttccagccttctggaaagctccgccagagtcatcctcgtctcactcaaggacattgataaatctttattttttcgcggctgtgatgagagcaaagcatacttttccgtcagttccacaacagaatcaagcgtttgataatagaaacgctctgcctgataaaaacgcttcggctcctgctttgtgagcagatatattcgtcgggttatccgcagtatctctgcattctgcttcagcatttgtatacttttagagcggaaaagcgccctgcgtaatcggatgattttaccctttgcttcctcgagattttccttgatataagcatattcttttcttgtcagccggtgtttttttaaaaagagacgcttcgcattccacaagccggacgcactgactgcggctccgccggccgccccgtataaaagcgaatacagaaaaggctggtgccctatcgtaaagaaggttatccccgctaatacaaaaactgtgctgccgcaaaatgtccatttcatatattgaataaacggtttcatacttgatcgactcctatttattcacttttatcagtattatctattacattccatgtctaaacaagttcctcttcttatcgtatcagttcttttataaaaagtgaaaaaactcctctgatttcaggcaaaaaaaagacccttttcagggttaagaatataacgtcggtgtatgaaggcttttcaatttacgaacgaaaaattcataattcggatcagaggtcggagtggaaactactttcttctcacactctaaacatataaatttcgtataaatatggattcccctgcttttcttggtttcacacacaatacatgtttcttcatggccggacgtttcattcattttgcccacctccgtatgaatagccttcccttaaactgttgattgtatacacaatttggatctttttgaagtttgcaattagtatatgggcgttcccgtatttcggtgtttgtttcgtttttattcaaaaacaaaaaaggcagctcatgatgagctgcctttaccgtaatgatagcttggcggcgtcctactctcacagggggaaacccccgactaccatcggcgctgaagagcttaacttccgtgttcggcatgggaacgggtgtgacctcttcgctatcgccaccaaaccattgagagtgttctctcaaaactagataacagtaagcatacattcaaattggttaagtcctcgatcgattagtatctgtcagctccatgtgtcgccacacttccacctcagacctatcaacctgatcatctttcagggatcttacttccttgcggaatgggaaatctcatcttgaggggggcttcatgcttagatgctttcagcacttatcccgtccgcacatagctacccagcgatgcccttggcagaacaactggtacaccagcggtgcgtccatcccggtcctctcgtactaaggacagctcctctcaaatttcctgcgcccgcgacggatagggaccgaactgtctcacgacgttctgaacccagctcgcgtaccgctttaatgggcgaacagcccaacccttgggaccgactacagccccaggatgcgatgagccgacatcgaggtgccaaacctccccgtcgatgtggactcttgggggagataagcctgttatccccggggtagcttttatccgttgagcgatggcccttccatgcggaaccaccggatcactaagcccgactttcgtccctgctcgacttgtaggtctcgcagtcaagctcccttgtgcctttacactctgcgaatgatttccaaccattctgagggaacctttgggcgcctccgttaccttttaggaggcgaccgccccagtcaaactgcccacctgacactgtctccccgcccgataagggcggcgggttagaaggtcaatacagccagggtagtatcccaccgatgcctccaccgaagctggcgctccggtttccaaggctcctacctatcctgtacaagctgtaccaacattcaatatcaggctgcagtaaagctccacggggtctttccgtcctgtcgcgggtaacctgcatcttcacaggtactataatttcaccgagtctctcgttgagacagtgcccagatcgttgcgcctttcgtgcgggtcggaacttacccgacaaggaatttcgctaccttaggaccgttatagttacggccgccgtttactggggcttcaattcgcaccttcgcttacgctaagcgctcctcttaaccttccagcaccgggcaggcgtcagcccctatacttcgccttacggcttcgcagagacctgtgtttttgctaaacagtcgcctgggcctattcactgcggctctctcgggcttgcaccctaacagagcaccccttctcccgaagttacggggtcattttgccgagttccttaacgagagttctctcgatcaccttaggattctctcctcgcctacctgtgtcggtttgcggtacgggcacctctcacctcgctagaggcttttcttggcagtgtggaatcaggaacttcgctactataattcgctcgccatcacagctcagccttcacgggaaacggatttgcctatttcccagcctaactgcttggacgcggatatccaataccgcgcttaccctatcctcctgcgtccccccattgctcaaatggtgaggaggtggtacaggaatatcaacctgttatccatcgcctacgcctttcggcctcggcttaggtcccgactaaccctgagcggacgagccttcctcaggaaaccttaggcattcggtggaggggattctcacccctctttcgctactcataccggcattctcacttctaagcgctccacaagtccttccggtcttgcttcacagcccttagaacgctctcctaccactgttcgaagaacagtccgcagcttcggtgatacgtttagccccggtacattttcggcgcagagtcactcgaccagtgagctattacgcactctttaaatggtggctgcttctaagccaacatcctggttgtctaagcaactccacatccttttccacttaacgtatactttgggaccttagctggcggtctgggctgtttccctttcgactacggatcttatcactcgcagtctgactcccaaggataagtcatcggcattcggagtttgactgaattcggtaacccggtaggggcccctagtccaatcagtgctctacctccgagactcttaccttgaggctagccctaaagctatttcggagagaaccagctatctccaggttcgattggcatttcacccctacccacacctcatccccgcacttttcaacgtgcgtgggttcgggcctccattcagtgttacctgaacttcaccctggacatgggtagatcacctggtttcgggtctacgaccacgtactcaattcgccctattcagactcgctttcgctgcggctccgcatcttctgcttaaccttgcacgggatcgtaactcgccggttcattctacaaaaggcacgccatcacccgttaacgggctctgactacttgtaggcacacggtttcaggatctctttcactccccttccggggtgcttttcacctttccctcacggtactggttcactatcggtcactagggagtatttagccttgggagatggtcctcccggattccgacggaatttcacgtgttccgccgtactcaggatccactcaggagagaacgaagttttgactacagggctgttacctcctatggcgggcctttccagacctcttcatctacctcgttcctttgtaactccgtacagagtgtcctacaaccccaagaggcaagcctcttggtttgggctggtcccgtttcgctcgccgctactcagggaatcgcatttgctttctcttcctccgggtacttagatgtttcagttccccgggtctgccttctcatatcctatgtattcagatatggataccactccattacgagtggtgggtttccccattcggaaatctccggatcaaagcttgcttacagctccccgaagcatatcggtgttcgtcccgtccttcatcggctcctagtgccaaggcatccaccgtgcgccctttctaacttaaccgttaaaaagaatcactacgtgatatcttgcattactaattgaatgtgaattacttctgttatctagttttcaaagaacacgttggtggagcctagcgggatcgaaccgctgacctcctgcgtgcaaagcaggcgctctcccagctgagctaaggccccgtattgggtaaagatggtgggcctgagtggactcgaaccaccgacctcacgcttatcaggcgtgcgctctaaccagctgagctacaggcccatctaccatatgaaagaatcaaaattccttcaaaactaaacaagacagggaacgttctgtttataagacccaaggtcttatattccgttaaaatccttagaaaggaggtgatccagccgcaccttccgatacggctaccttgttacgacttcaccccaatcatctgtcccaccttcggcggctggctccataaaggttacctcaccgacttcgggtgttacaaactctcgtggtgtgacgggcggtgtgtacaaggcccgggaacgtattcaccgcggcatgctgatccgcgattactagcgattccagcttcacgcagtcgagttgcagactgcgatccgaactgagaacagatttgtgggattggcttaacctcgcggtttcgctgccctttgttctgtccattgtagcacgtgtgtagcccaggtcataaggggcatgatgatttgacgtcatccccaccttcctccggtttgtcaccggcagtcaccttagagtgcccaactgaatgctggcaactaagatcaagggttgcgctcgttgcgggacttaacccaacatctcacgacacgagctgacgacaaccatgcaccacctgtcactctgcccccgaaggggacgtcctatctctaggattgtcagaggatgtcaagacctggtaaggttcttcgcgttgcttcgaattaaaccacatgctccaccgcttgtgcgggcccccgtcaattcctttgagtttcagtcttgcgaccgtactccccaggcggagtgcttaatgcgttagctgcagcactaaggggcggaaaccccctaacacttagcactcatcgtttacggcgtggactaccagggtatctaatcctgttcgctccccacgctttcgctcctcagcgtcagttacagaccagagagtcgccttcgccactggtgttcctccacatctctacgcatttcaccgctacacgtggaattccactctcctcttctgcactcaagttccccagtttccaatgaccctccccggttgagccgggggctttcacatcagacttaagaaaccgcctgcgagccctttacgcccaataattccggacaacgcttgccacctacgtattaccgcggctgctggcacgtagttagccgtggctttctggttaggtaccgtcaaggtgccgccctatttgaacggcacttgttcttccctaacaacagagctttacgatccgaaaaccttcatcactcacgcggcgttgctccgtcagactttcgtccattgcggaagattccctactgctgcctcccgtaggagtctgggccgtgtctcagtcccagtgtggccgatcaccctctcaggtcggctacgcatcgtcgccttggtgagccgttacctcaccaactagctaatgcgccgcgggtccatctgtaagtggtagccgaagccaccttttatgtctgaaccatgcggttcagacaaccatccggtattagccccggtttcccggagttatcccagccttacaggcaggttacccacgtgttactcacccgtccgccgctaacatcagggagcaagctcccatctgtccgctcgacttgcatgtattaggcacgccgccagcgttcgtcctgagccaggatcaaactctccgataaagtgtttgactgactacgcacatcgctgtgcgatttatttaaaactttgaattaacaggtacgttttgtcttgtttagttttcaaagaactttgtccatcgctcttgaagcgacttaattattataacatctcagtgtcattgtcgtcaataactttttaaaatttctttttcaagaattcgtttcgtcatcagcgacgtatattagaataccacccttgatccaacatgtcaacaataatcgacaaattaaatgatgaagcgtttaatgactatcaaagccgcgataccgggaatcccaagaattccgctgatgcccgttgtaatcaggttaacagggatatgaatacccagactgcccccgaacaagttcacacccaccaacagaatcgcgccggcaataaacttaatggcagtcacaccaatccaccttaacggttttgaagatactccccataaaaaaagcaaagcaaccagaccgacaatcaaaccgataatgaaaaaaggctccatgaatcttccccctcgcttgtttagtacaagcttatgagaagattccggagaatagacctcttacttccatctgctcattttcaaattccgctgcttcgcttctttcaaataaaaaaagtacttagattcagcgactttcagctcaaacaacacctcagcggagggctctagacttttctcgaccagactcttctgtctgttccattcttctttttgtttaaagagctgttctatcagcttctcgtcaaactcttttcttaatgtatttctgcgaagaaaacccatgccttgccttttcctcccttacaattcacgtcttccttcaagagcttttgaaagagtgacctcatcagcatattccaaatcaccgccgacgggcagaccgtgggcaatacgggagagcttgatgcctgagggctttaacagccttgatatatacatcgctgttgcttccccttcaatattagggttggttgcgagaataacttctgtcacttgatcatcctgaagacgtttcagcagctccggaatcttaatatcctccggaccgatgccgtccattggtgaaatcgcgccgtgaagaacatgatactggccgttatattccttcattttctccatcgcgatcacatccttagggtcctgcacgacacaaataacagacttatctcttcttgtgtcctcacatatataacaagggtcctgatctgtaatatgtccgcaaatcgagcaatatgtcagattccgcttcgcattgacaagcgccttagcaaaatccaatactgtgtcttctttcatacctagaacaaaaaaagccagacgaaccgctgttttcggtccgatccctggcaatttcataaagctgtcaatcagctttgatattggttcaggatactgcatgtttatttatccccctagaataaacccggtatgttcattccttttgtaaattgtcccattgtctcattcgtcatgtcatccacttttttgagggcgtcgtttgtcgcagcaagaaccaggtcctgaagcatttcgatatcttccggatcaacaacttcttctttaatggcaacgtctacaacttctttttggccgttgacttttacagtcaccataccgccgcccgcagtgccttcaagcactttttcagcaagttcctcctgagccttcgccatatccttttgcattttttgcatttgtttcatcattttttgcatgtttcccattccgccacgcatattcaatcactctctttcatcttattagtcttttatttcgattaaatccgctccgacaagttttttcgcctctgcaatcagcggatcttcttcagccggttcgtttgatccttcactttcctgctggtgatcatttaaaaattcttctcttattttaccccattgtgcttccggaacgccaatcaaatccattcttttcccgagcattgattcgagaatctgttcaagattcgtacggactccgttattgtcttctgcaaccattttacaatggatttcgtatttaaatttaagcacaaatgccttttgagcagcggccaccggttcactgtcattcaaaagagccgcatgagacaccttattctgctgtttcaggtgtgccagcagcttgccccagctgcttttaagctgttcaagatcaggtcttgtggcttccttcaatatctcatgaattcttccgaccggggctttataatggctttttccgcctttttgaggacgcggagcttctttcggagcgctttccatctgaaccttcacaccggaggttttcagcctttctacttcctgctcaagctgctggatcttattcatcagcatgccgacctcagggatgtctccggcggattgctgtgccgtttggcatattttcacgacagccacttcaaaaaagattcttgggtggttcgtccacttcatttcctgatggcttttattcaggatatcaatcatctcatataaagcgggggccggtatgtcaccgctcagattccgaaacgtttcatcgaccttcaccttctccaggactccttctaaaccgggagcggcctggtacaagagcatatccctgaaatagaaaatcatatcttcaatcagtttggccgcatctttcccctgctggagcaattcattcagtgtttccaatgcctcggaaacctgtttgcggtgaagagcagatgccagttttccaatatagtgctgagaaacggctccggtaatgagcaaagcgtcatccaccgacagctcctcgccgctgaatgatacagcttgatcgagcaggctcagcgcgtccctcattcctccgtccgcagcactcgctatgatatcaagggctccttcttccaccttcagctgctctgcatcgacgattgtcttcattcgtccgacaattgctttggatgtaatccgtttgaagtcaaaacgctgacatctggagataatggttaaaggaatcttatgaggctcagtcgtagctaatatgaaaatgcaatgtgccggcggttcttccagcgttttcagaagcgcattgaatgcgccgatagagagcatatgcacctcatctataatatataccttgtaagtaacggccgacggggcaaattttactttgtcacggatgtcgcggatttcgtctacgccgttattcgacgccgcatctatttcaatcacatctgatatagagccatttgtgatccccttgcatgccgcgcactcattgcacggttcttctacaggggcgtgctcacagttgactgctttcgcaaatattttagctgcactggtttttcccgttccccgcggtccagaaaacagatatgcatgagaaaatttcttttgcaaaagggcattttgcagcgttttcgtaatgtgttcctgtccgaccacatcttcaaactgctgaggcctaaatactcgatataaagcttggtaacccacaggatgcgccctcctctgttattcatcatgtttattatacatgaacgtgcttttaacgccaaaacccgtttttcatatacgaaaaaactcacctgccataacaggtgagtctgaaatttgatgattgatttaccgtgcaccttctgtcgattcgctaccctaagcgttacttaagcagttagctcagcccaggcaaccctgcggcacatgagaggtttcacttaatgctgcttccttccggacctgacatggttcatgaattcccattgcgcaggacccagacgtcaacgccacttacttaaggcagaccttacagtaaacgaacctcgagaagggattcggccccgctagagcggattgcgggtacagggcaccgctacctccccgcttagcacggcaaaataaatatcaaattttgatatgcgcaccattcatgatgcacacataagtatatctgcttcaggcagaaaatgcaaccgtactactcagacaactttttcctcatgtctttcttttgccggcgcagctttctgaaaaaagcgctgagcatttctccgcactcttctccgagcacgccgctcaccacttccgcttggtggttgaaccgctcttcctgcaagaggttcatcagcgttcctgtacagccccccttgggatcaaatgcgccgaatacgaccttatcgactctcgaaagcacgacggctcccgcgcacatcggacacggctccaaagtgacatagagaacggcatcctcaagtctccatgtccccagcttacggcacgcttcgtctatcgccagcatttcggcgtgggcaagcgacctctgttcagtctcccgcagattatgcgcccgcgccacgatctcatcgtgcagaacaagaactgctccgatcggcacttcacctttctcttcggctttcttcgcttcttttatggcttctctcatataatattcatcattcatcggttcgagctctcttcttaagttttttcatgtctcataaaggttaaaataggaataccccagcagaaaggagttgccggtattgtctgaacctaacaacacagcccttctgattgtcgatatgatcaacaattttcaatttgatatgggcgaacgtcttgctgaaaaaaccaaacaaattgtcccccgtattttatcattaaagaagcatgcaaaacaaagcaactggccgattatttatattaatgatcattacgggctctggaaggctgatattgatgccatcagggaggaatgcagcaacgacagaagcgcctccattataaaagatatttcgcctcagccggatgattattttctcattaaaccgaagcattccgctttttacgaaacggcgcttcacacccttctgaccgaattacaagtgaaccgattaatcatcacggggattgccgggaacatttgtgtgctgttcacggccaacgacgcttatatgagagaatacagcattgccattccgaaagactgcaccgcttccaataacgacgaagacaatgatttcgctttgaccatgatggagaatgttctcttcgcagaaataaccacggaaaaacaaattaccggcgaaaaataaacatgatcagcctccttttttcatatatttgatagcggatatgaaaggaggcgtttttcattcagatctatatagtgaaacggggcgacacgctttccgctattgcggcgcgctaccggacagccgcaaatgtcattgcggaagcaaataaactgcctaatcccaatacattggttgtcggacaaacccttgtcatcccgattgagggtcaatattacgaagtaaaacaaggtgatactctcgcgtcaatcgccggccgttttcatatatcggccgcggagcttgcgagggtgaacggaattcagcccggcaccacattgagagtcggaacccgcctttacattccgcagcaggcgaataagcccgatatcgaatcaaacgcatatatagaaccgcggggaacgagcgtaagcgctaatcttcagcaggcggcaagggaggcctctccttatttaacatacctcggcgcattcagttttcaagtgcagcggaacgggactttaaaggaaccgcctctgaccaatttaaaaagcatcagtgacaggcacaacaccacactgatgatgatcatcaccaaccttgaaaatgacgcattcagcgatgaactcgggcggctcatcttgaacgacaatacagtgaaaacaaaactctttcaggaaatcgtctccacggctaaaaagtacggctttcgcgatattcactttgatttcgaatatttacgtccacaggacagggaagcctacaatcgttttttacgtgaagcgagaacgatttttcatcgggaaggctggaagatttcaacggcgcttgctccgaaaacgagcgcgactcaggccggcaaatggtacgaagctcatgactatagggcacatggagaaatcgtcgatttcgtcgtgattatgacatatgagtgggggtacagcggaggcccggctgaggccgtatcacctatcggccctgtaagaaatgtcattgagtacgcgctgacggaaatgccttcttcaaaaatcgtcatgggccagaatatgtacggctatgattggacactgcctttcaaacagggaacgacagcgaaagccgtcagtcctcagcaggcaatcgctctggcagcacgctataaagtcgacattcaatatgacgaaaccgcccaggctcccttcttccgatacacggatgcaaatcagagacggcatgaagtatggtttgaagacgcacgatccattcaagcgaaattcaatttaattaaagaacttcatttaagaggaatcagctattggaaactcggcctttctttcccgcaaaactggcttttgctcggcgatcaatttcatattgtaaaagagacgtttcgttaattgggagcgtcttttttcatgggcttttctgtgagtgtgatacaatataaaggccggcagctgacggatgtttgcagaattaaggaggattttcaatgaacagagccccttttatcgcggtagaaggtcctatcggggcaggaaaaacgacactcgctacgatgctttctgaagagctcggttttcctatgattaatgagattgtggaagacaacccttatctcgataagttttatgacaatatcgaggagtggagtttccagcttgaaatgttttttctatgtcacaggtataaacagcttgaagacaccgatcgagattatttaaaacaaggacagcccgttttgtccgattatcatatttataaaaatgttattttcgcagagcgtacattgcacggccaaaagcttgagaagtataagcagatctatcatctgctcactcacgacctgccgaagccgaatatcattgtatacataaaggcaagcctgccgacattgcttcaacgcattgaaaaacgcgggcgcccgtttgagaaaaatatcgaacatcaatatctggaacatctcattgcagattacgacacagccatcagacagcttcaggaagaagatccggatatatctgtactgaccattgacggtgatactgaagactttgttttgaataagacagactatgaaagaattgcccgtcaggtaaaggagcttattaaatgaaagacattcatattccaaacaacgccattataacagtagcgggaacggtaggagtcggaaaatcgactttgaccaaagctttagcaaaacggctcgggtttcatacctcacttgaggaagtggatgaaaacccttatttagagaagttttatcacgattttgaacgctggagcttccatttgcaaatttattttctggctgagcggttcaaagagcaaaaaaacatgtttgaatcaggcggcggattcgtgcaggaccgttcgatttatgaagatacaggcatattcgcaaaaatgcatgccgataaaggaaccatgtcgctgacagattacacaacatacacaagcctatttgaggcgatggtcatgacgccgtatttcccgcatcctgatgttttgatctacttagaaggcgaccttgaatacattataagccggattgaaaagcggggccgcgagatggagctgcagacaaaccgctcttattgggaagagatgtatacacggtacgaagactggatcagcggttttaacgcctgccctgtactgaaagtacgcattgaagattatgaccttgaagctgatgaacagtcactggaacctttgatcgaaaaaatcagtcacgtgatcagcgaaaacagaaacaaataaaaatagcaaagcgattttccccgaacagagaaaatcgctttttttgcatataaaaaatccgctgcatcagatgcagcggacaaaacaatctccaatatatgctcgagtttcattaggtttaaaatcaatatggcggaggaagagggattcgaacccccgcgggctttgacacccctgtcggttttcaagaccgatcccttcagccagacttgggtattcctccgtatcgacatttaataatataccacatgacccaaatttcagtcaagcgctttttcatattttttatttcatttcttaaacagcttttccgtcagctttactatcatacaaaagtcttgcgtccaattcaacctcagtatgccatacgggcaggaaaacaaagtaaaaatcaagaatagattcaaacagataacctgctcataaaggtggagaacataatgaaaatcatcatcgcacccgattctttcaaagaaagcatgacatcaaaagaagccgctgacagcatagaaaaaggattcaaagcggtcttccctgacgcggaatataccaagatacccgcggccgacggcggagaaggaaccgttcaggctttgacggatgccactggcggaagcatcatcaaaaaaactgtgaccggtccgctgggaacgccggtaaacgccgcatatggacttctgggagacggacgcacggcagtcattgaaatggcggaagcatcgggactccatctcgttccccgccatctcagagatccgttgaacacaacgacaagaggaacgggtgaactgatagcggatgcagcctcccgcggggcgagtgagatcatcatcgggcttggcgggagtgcaaccaatgacggcggaacaggaatggcgagcgcgctcggtgtgcgtttcttaaatgaggaaggtcaggagatacatgacggaggaggcgctctgcacaccctagcttctattgatataagcgggctctcccctgatctgaaacatatccgttttcgtgccgcatgtgatgtcgaaaatcccctgaccggtgaaaacggcgcgtcatatgtcttcggcccgcaaaaaggggcgtccgagaagactaaagttgtattggatcgcaatttataccatttcgctgacgtattgagacgtcagcacgatatcgaagcggataccgtaaaaggcgcgggcgccgcaggggggctgggcgctggactgatcgctttcttacaggcagaaattcaaagcgggattgacgttgtattagatacactgtccttctcagatcagataagagatgctgaccttgtcattaccggagagggccagattgacggacaaacgatattcggcaaaacccccgccgggatcgccgcacgcgcagccgctcaagaaattcccgttatcgcattggcgggctccttaggcaaaaattttgagcatgtttacagcgcaggaataacagctgtattttctatcgtgcccggcgctgtaagtcttgaagacgccttagcatccggccgttttaacctggaaagtacagcccggaatgccgccgctctataccgggcagcaaaaaaggcgcgcctctagggcgcacctttttatggtttgatgacttctttatttcccatataaggacgaagcactttaggaatgatgacacttccgtcttcctgctggtagttttccaagatggcagctacagttctgccgactgcaagacctgaaccgtttaatgtatgcacatgctcaggcttgcctttcgcttcgcgtctgaaacgaatgttcgcacgtcttgcctggaaggcctcaaagttgctgcaagaagaaatttcacggtatgtgtcttggcttggaatccatacctcaatatcgtactttttcgcagctgtaaagccgagatcaccggtacacatgctcatgacgcgatacggcagttcaagcagctgaagcacccgctcagcttgatttgtcagtttttcaagctcctcataagaatcttccggcttcacgaactttacaagctcaaccttgttgaactgatgctgacggatcaaaccgcgtgtatcacggccggcggatcccgcttctgaacggaagcaggcgctgaacgcggcataattgatcggcaggttctcaccggataagatttcatcgcggtgcatatttgtaatcggcacttccgccgtcggaattaagaaataatcctcttctctgattttaaaagcatcctcttcaaatttaggaagctgtcccgtacctgtcatgctcgtacggtttaccatataaggaggaatgacttccgtgtaatcatattcatccacgtgaagatccagcataaagttgtagagcgcgcgttcgaggcgggcgcctaatcctttataaaacacaaaccggctgcctgttacttttgaagcgcgttcgaaatcaagaatgtttaagcggtctgcgatatcccaatgcggtttcggctcatatgaaaatgccggcgcctctccccacttgcgaatttcaatgttatcatcttccgtttctccgacgggaactgaatcgtgcgggatgttcggaatagacagaaggatggtttcgagcgtcgtttcgacagtacgaagctcttcatcaagcttcttaatttcttcgcctacttcacgcatctctttaataatatgatcagcgtcttttttctcccgtttcaaaacggcgacctgctgagacacctcattgcgttttcccttcagttcttctactttaccgataagctctcttctcttttcatccagctcttcaaacttgtcaaagtcagataagtcttcgccttttggaatgagcttcgcttttacctcttgaaaattggctctcagcaccttcgtatcaatcatgcctaacaactcctatctgtttttatcgaaaataaaaaagagccctcatcccctaaaagggacgagagctctcgcgttgccaccctgattgaaaacaagctcacacttgctttccgctttaacacataacggttttcccgtaaatgcctacttgttttcagcatttcgctcaaggacggattcggacagcatctttcaccgattcgcaccacccatcggctctctttgaaagaggggcttcctactgcttcctgtcaacgcttttcgatctttatttgtgattataatgtactataagtatcagcggttttcaactgttttatacagctgtttcctgcttatgcttttccgccatcttcacaaacagctctgtcacccggtgatcatccgtcagttcaggatggaacgagcagccgaggaaatttccctgctttgcagccacgatgcgtccgttatgctcacaaagcacttcaacatcttctccggcttttaaaatatgcggtgcgcgaataaatacacccgtaaacggctcatcaaggcctttaatcgtcagatcagcttcaaagctgtcgacctgacggccaaaggaattacgctcgacaactacgttcaacagccctaaatgagcgttatccgttcccgctatctctttggctaagataatcagaccggcgcatgtgccgaacatcggcttgccttgagcggcaaactcgcgaagcggctccataaaatgatacgtatccattaaacgccgcatcgtcgtgctttccccgcccggcaggattaagccgtcgatgtcattcagctgttcaggacgcttaatgacgacaccttttgaaccacatgcttcaattgaacgaatatgttctcttactgctccttgaagtccaagtacaccaattgttaacatgcttacagctctcctatggttttaccagccgcgttcttgcatacgctgttccggcaatagatttgagatttcgatgcctttcattgctgtgcctaattctttagaaagctcagcgatcagtttgtagtctgtataatgagtcgttgcttcaacaattgctttggcgaatttagcagggttgtctgatttgaaaatacctgaaccgacaaatacgccgtcagcgccaagctgcatcatcaatgccgcgtcagcaggcgtcgctactccgccggcagcaaagttcactacaggcagtttgccgtcacgtttgatctgaagaagcagttcataaggagcgccgaggtttttagcttcagtcatcagctcatcatcgctcatcgcaacaactttgcgcacttgcgcgtttacttttctcatatggcggacagcttccacaatgtttcctgttcccggttcgccttttgtacgaagcatggaagctccttcggcgatacggcgcgttgcttcgccgagatcacggcagccgcatacgaacgggactgtatattcatttttatttaaatgaaattcttcgtcagccggagtcagaacttcactttcatcgatgtaatctactcccattgcttcaaggacacgcgcttcaacgatatgtccgatacgcgcttttgccattacgggaatggatacagcattcattacttcttcaacgattgtcggatcagccatgcgggcaacaccgccggcagcgcgaatatcagccggaacgcgttctaacgccattacggcaacagctcccgcctcttccgcaatcttcgcttgttcagcatttactacgtccatgatgacgccgcctttttgcatttccgccatgccgcgttttacacgatcagtacctgtttgagccattatttggtccccctagtcaatgtatagttagataatgtctatctcttattgtatcccagaaatacaatatttcatatgggtattcttattttacagcgagatgaataagatagatatcatttttttactaataatttggttttttcagtatattaagcaaaagagccctaactttcatcagagctctttcttatttcttaaaaccagcctgttaccgtgtcaacggcgctgttccagataccggagaaaaatccgccgatgccgcgcatcatctgaacaaaccagtttgctttatctacatcatttttcgttacaagattcacgctgaactctttggatttgaggaagccatagtctttgtcactgcctttgtatgtaactgtcagcgttccgactttcgttccctttttcacaggagccgtgatttcttttttatctatagtcccttcggctttatagttcttttcatccccgcttttcacaggaatagaaagcgccttgtcagtaacaatatcgacttgcttgtctttccctttttcaacgtcaaccgttttgtgcccttttacttgagagccttcagggtaaagatctttcattgagaaattgctgttaaatgcgtaatcgagcatttttttcgtttcatcaaaacgtccggtatgcaggttgccttttgcgtttaatacaacggtgatgacccgcattccgttccgctgtgctgtgcttgtaaaacaagatcccgcagaatcagtagaacccgtttttaagccgtcaacgccagggtattcagaaacaagaccttttaacatgaagttccagttcggcatgtccatttcatcatcagtgccggctctgaatttcgttttagcgatgcttgttgttttgagaacttccggataatcagtgatcaggcggtctgcaagaagcgccatgtctttagcagaaacttcactctcttctttaacgccttctccttgcggctgtttgccgtgaagatcttcattcacaagccctgtggcatttttaaaatcatagtttgtcatgcctaattctttggctttcgcattcatttcagcgacaaatttcgtttcagttccggcaagaatttcggcaactgcaatcgcggctccgttagcagagtaaatcgccatggcctgatacagttctttaaccgtgtatttgccgtcttttcgaagggggacgtttgataaactgttgtcttgagaaatttcatagacataatcatcaggagtatacgtttgatcccatttcacttttccttctttaatggcttccagaagcagatattcagtcatcatttttgtcatgctggcaatcggcagtcttttgtctgcatttttactgtataaaatttttcccgatgaagcctcaatcattatcgcagctgatgcgttgacatcaatcgggtcattgccggctgcctccgctttagacatcggaacaaagcaagttgcggccagtgccagtaccactaatgacaccaacagctgtttccatttcgtgatgttcaatcttacgacctccgtcattcattttaaatctataattaagccgttaaggacatattcaaattcaaaacacaacagtataaattttatcacactcgatataaaaaaaatagacagagtcagcgaccctgtcaaatgttttttatttgtaacaattatgagattgtgtagtttggtgattctttcgtaatttggacatcatgcggatgactttcgcgaagaccggcacctgtcatacggatgaattgagcctcttctcttaaagcgcgcaagtcttttgaaccgcaatatcccatacctgaacgaagaccgccgacaagctgatacactgtttcttctacaggacctttgtacggagtccgtccttcgataccttcagggacgaatttcttattttcttcttggaaatatcggtctttactgcctttttccatggcagcaacagaacccataccgcgatacactttaaatcttctgccctgatagatttcagtctctcccgggctttctgaagtaccggcaagcaggcttccgagcattacggcatgtccgcctgaagccaacgctttcgtaatatctccggagaatttaataccgccgtctgcgataattgtcgcgccgtgttttctcgcttcagtggcacaatcataaatggcagtgatctgcggtacgcctacacctgcaacgacgcgtgtcgtacagatagaaccaggcccgattcccactttgacaatatttgctccggcttcaatcagagcttttgtcgcttcagccgttgcaacatttcctgcgataatgttcagttcaggatatgtttcacggattttcgcaactgtgttcagtacgcctctggaatgtccgtgagccgtatcaaccacgataacgtcgacattcgcttcaacaagcttgctgacgcgtgtcattgtatcgcctgtcacgcctaccgcagcgccgacaataaggcgtccgtgttcatctttagatgaattagggaattcgataaccttttcaatatctttgatcgtgataagaccttttaatttgttttggtcatccactaacggaagtttttcaattttatgtttctgtaagattttttctgcttcgtctaatgtggttcccacaggagccgtaaccagctcttcttttgtcatgacatcactgattttcattgaataatcagagataaagcgaagatcacggtttgtaatgataccgacaagcttttgatcgtctttattatctacgatcggaacaccggaaattctgtatttccccatcaaatgctccgcatcgaatacttgatgatcaggtgttaaaaagaagggatttgtaataacgccccgttcagaacgtttgactttgtcaacatgttcagcctgctgttcgatggacatgtttttatggataatgcccaagccgccctgtctggccatcgcaatcgccattgctgattctgttactgtatccattcccgcactgatgacaggaatattaagctttaacgtttttgtcagttcaacagataaatccacatcacgcggaagtacgtctgattgagccggtacgagcagtacatcatcgaacgttaagccttcttttgaaaatttactttcccacattagtaaatccccctcttttcggcaaaatattatatgtagattatcaactagaaaacagcatgtcaaggaagcgaaaaagagttgaaatatttagataaaggaaagggtttaaaaatacatatgagagatcatgagtggaaagagttatcattattttattccgtagaatcttcccagaaatttctaaacaaagtctatacagaaagcggcatggaagaaccaaaacgatatgcgtttaagaacagtgagcgcttcatattctttatcaaacacgccgagtccttttataagcaggcatctctttctcctttagaaattaagcctattctgttgttttacgggatgtcacaattgctgaaagcctgccttctgaccacagatccaagctacccaagccacgcttcagtactcgcgcatggcgtgactgcccggaaacgcaaaaagcaaaattactcctttagggatgatgaagtgaaggtgcagcgcaatggcttatgtattcatgtaatgaagcacttattcgggatagctggtcttgaggaagaacggtacacaatgaagaaattactgacagccatacctgaattgcatactgtcttttacttccaagagaaaaagaattggatgacccaagtagagctgaacgatgaccttatttcagtgcctgagcatgcggtgattcattacaatatgtctgattcccgctttgctgaatatatcagccatcatttgaagtggtcttttctgaggaaagaccataaccacttgttttttgaggctgacccgatagacagggaaccttggtcttctccaaatttattgtttcacttggagaaaaatcaatattacattccctctcagcgtgatcacttcctgcatcttccggaaatgattattcattatttggttctctacaatattgggatgattgcgagatatgaaacggagtggtggtatgaactgctgacacagcatgtcagtgatgattatgtgatgatccgacggttcttagaggtcacggaacgcaaatttccgtattacgtttctaaattcctgaagcaatacttgtaaacaaaaaaggcagctcatgatgagctgcctttaccgtaatgatagcttggcggcgtcctactctcacagggggaaacccccgactaccatcggcgctgaagagcttaacttccgtgttcggcatgggaacgggtgtgacctcttcgctatcgccaccaaaccattgagagtgttctctcaaaactagataacaataagtatacattcaaattggttaagtcctcgatcgattagtatctgtcagctccatgtgtcgccacacttccacctcagacctatcaacctgatcatctttcagggatcttacttccttgcggaatgggaaatctcatcttgaggggggcttcatgcttagatgctttcagcacttatcccgtccgcacatagctacccagcgatgcccttggcagaacaactggtacaccagcggtgcgtccatcccggtcctctcgtactaaggacagctcctctcaaatttcctgcgcccgcgacggatagggaccgaactgtctcacgacgttctgaacccagctcgcgtaccgctttaatgggcgaacagcccaacccttgggaccgactacagccccaggatgcgatgagccgacatcgaggtgccaaacctccccgtcgatgtggactcttgggggagataagcctgttatccccggggtagcttttatccgttgagcgatggcccttccatgcggaaccaccggatcactaagcccgactttcgtccctgctcgacttgtaggtctcgcagtcaagctcccttgtgcctttacactctgcgaatgatttccaaccattctgagggaacctttgggcgcctccgttaccttttaggaggcgaccgccccagtcaaactgcccacctgacactgtctccccgcccgataagggcggcgggttagaaggtcaatacagccagggtagtatcccaccgatgcctccaccgaagctggcgctccggtttccaaggctcctacctatcctgtacaagctgtaccaacattcaatatcaggctgcagtaaagctccacggggtctttccgtcctgtcgcgggtaacctgcatcttcacaggtactataatttcaccgagtctctcgttgagacagtgcccagatcgttgcgcctttcgtgcgggtcggaacttacccgacaaggaatttcgctaccttaggaccgttatagttacggccgccgtttactggggcttcaattcgcaccttcgcttacgctaagcgctcctcttaaccttccagcaccgggcaggcgtcagcccctatacttcgccttacggcttcgcagagacctgtgtttttgctaaacagtcgcctgggcctattcactgcggctctctcgggcttgcaccctaacagagcaccccttctcccgaagttacggggtcattttgccgagttccttaacgagagttctctcgatcaccttaggattctctcctcgcctacctgtgtcggtttgcggtacgggcacctctcacctcgctagaggcttttcttggcagtgtggaatcaggaacttcgctactataattcgctcgccatcacagctcagccttcacgggaaacggatttgcctatttcccagcctaactgcttggacgcggatatccaataccgcgcttaccctatcctcctgcgtccccccattgctcaaatggtgaggaggtggtacaggaatatcaacctgttatccatcgcctacgcctttcggcctcggcttaggtcccgactaaccctgagcggacgagccttcctcaggaaaccttaggcattcggtggaggggattctcacccctctttcgctactcataccggcattctcacttctaagcgctccacaagtccttccggtcttgcttcacagcccttagaacgctctcctaccactgttcgaagaacagtccgcagcttcggtgatacgtttagccccggtacattttcggcgcagagtcactcgaccagtgagctattacgcactctttaaatggtggctgcttctaagccaacatcctggttgtctaagcaactccacatccttttccacttaacgtatactttgggaccttagctggcggtctgggctgtttccctttcgactacggatcttatcactcgcagtctgactcccaaggataagtcatcggcattcggagtttgactgaattcggtaacccggtaggggcccctagtccaatcagtgctctacctccgagactcttaccttgaggctagccctaaagctatttcggagagaaccagctatctccaggttcgattggcatttcacccctacccacacctcatccccgcacttttcaacgtgcgtgggttcgggcctccattcagtgttacctgaacttcaccctggacatgggtagatcacctggtttcgggtctacgaccacgtactcaattcgccctattcagactcgctttcgctgcggctccgcatcttctgcttaaccttgcacgggatcgtaactcgccggttcattctacaaaaggcacgccatcacccgttaacgggctctgactacttgtaggcacacggtttcaggatctctttcactccccttccggggtgcttttcacctttccctcacggtactggttcactatcggtcactagggagtatttagccttgggagatggtcctcccggattccgacggaatttcacgtgttccgccgtactcaggatccactcaggagagaacgaagttttgactacagggctgttacctcctatggcgggcctttccagacctcttcatctacctcgttcctttgtaactccgtacagagtgtcctacaaccccaagaggcaagcctcttggtttgggctggtcccgtttcgctcgccgctactcagggaatcgcatttgctttctcttcctccgggtacttagatgtttcagttccccgggtctgccttctcatatcctatgtattcagatatggataccactccattacgagtggtgggtttccccattcggaaatctccggatcaaagcttgcttacagctccccgaagcatatcggtgttcgtcccgtccttcatcggctcctagtgccaaggcatccaccgtgcgccctttctaacttaaccgttaaaaagaatcactacgtgatatcttgcattactaattgaatgtgaattacttctgttatctagttttcaaagaacacgttggtggagcctagcgggatcgaaccgctgacctcctgcgtgcaaagcaggcgctctcccagctgagctaaggccccgtattgggtaaagatggtgggcctgagtggactcgaaccaccgacctcacgcttatcaggcgtgcgctctaaccagctgagctacaggcccatctaccatatgaaagaatcaaagttccttcaaaactaaacaagacagggaacgttctgtttataagacccaaggtcttatattccgttaaaatccttagaaaggaggtgatccagccgcaccttccgatacggctaccttgttacgacttcaccccaatcatctgtcccaccttcggcggctggctccataaaggttacctcaccgacttcgggtgttacaaactctcgtggtgtgacgggcggtgtgtacaaggcccgggaacgtattcaccgcggcatgctgatccgcgattactagcgattccagcttcacgcagtcgagttgcagactgcgatccgaactgagaacagatttgtgggattggcttaacctcgcggtttcgctgccctttgttctgtccattgtagcacgtgtgtagcccaggtcataaggggcatgatgatttgacgtcatccccaccttcctccggtttgtcaccggcagtcaccttagagtgcccaactgaatgctggcaactaagatcaagggttgcgctcgttgcgggacttaacccaacatctcacgacacgagctgacgacaaccatgcaccacctgtcactctgcccccgaaggggacgtcctatctctaggattgtcagaggatgtcaagacctggtaaggttcttcgcgttgcttcgaattaaaccacatgctccaccgcttgtgcgggcccccgtcaattcctttgagtttcagtcttgcgaccgtactccccaggcggagtgcttaatgcgttagctgcagcactaaggggcggaaaccccctaacacttagcactcatcgtttacggcgtggactaccagggtatctaatcctgttcgctccccacgctttcgctcctcagcgtcagttacagaccagagagtcgccttcgccactggtgttcctccacatctctacgcatttcaccgctacacgtggaattccactctcctcttctgcactcaagttccccagtttccaatgaccctccccggttgagccgggggctttcacatcagacttaagaaaccgcctgcgagccctttacgcccaataattccggacaacgcttgccacctacgtattaccgcggctgctggcacgtagttagccgtggctttctggttaggtaccgtcaaggtgccgccctatttgaacggcacttgttcttccctaacaacagagctttacgatccgaaaaccttcatcactcacgcggcgttgctccgtcagactttcgtccattgcggaagattccctactgctgcctcccgtaggagtctgggccgtgtctcagtcccagtgtggccgatcaccctctcaggtcggctacgcatcgtcgccttggtgagccgttacctcaccaactagctaatgcgccgcgggtccatctgtaagtggtagccgaagccaccttttatgtctgaaccatgcggttcaaacaaccatccggtattagccccggtttcccggagttatcccagtcttacaggcaggttacccacgtgttactcacccgtccgccgctaacatcagggagcaagctcccatctgtccgctcgacttgcatgtattaggcacgccgccagcgttcgtcctgagccaggatcaaactctccgataaagtagtttgactgactacgcacatcgctgtgcgatttatttaaaactttgaattaacaggtacgttttgtcttgtttagttttcaaagaacttttccgcccctctcgaagcgacctcttaatcataacattttcagtttgctaggtcaatacttttttaaaaaatattttcgctaggcttgcctttctattaaaaagacaacaaaaagaattatatcagcatcatcaccatgtgtcaaagcttttttttatttctttatatagtaaaagcgcagcctgttgcagctgcgctttttcgtttatacttcttccgtttcttccggctcttcttcattcttttcgacaagcgccacagtggctacatgctcttgatcagacatgcggatcagacggacgccttgtgttacgcgtcccgtagtggagatatcattaatatccattctgattaacacgccgcttgccgtaataatcattaagtcctcttcgccttttgttgctttcacagttactaacggaccgttgctgtcagtgattttacatgttttaaggccttttccgccccggctttgaactctgtattctgaagccggtgtgcgtttgccgtagccgttttctgtcactatgaggacatgggagtcttcttcaagaatctccatgcctacaacgacatcatcgtctgtcagcgtgatacctttaacacccgcagctgtgcgtcccatttgtcttacatcttcttcagggaaacggatcagcaaaccgttcttcgttccgatgatgatttgtttcttgccgtcagtcaggcggacggccatcagttcatcgtcttcccggagacctagggcgatcagaccgttattccgtatattcgcaaactgggacagtgccgtacgtttcgacaccccttgtttggtcgtaaagaagaggtattgctcctcatcaaacgtgctgaccggaataatggcattaatccattcgcctttttcaacttccagaaggttaataatcggaatgccttttgccgtacggccgtattcagggatttcatatcctttagaacggtataccttccctttattagagaagaacagaatcgtatcgtgcgttgatgtggaaattaagtgttccacaaagtcatcttcattcgttcccattccctgtacgccttttccgccccgtttttggctgcggtatgtggacgccgggagacgtttaacatagccgttatgggtcagtgtgatgacgatattttctctctcgataagatcttcatcttcaattgtttcaagaccggacgtcacgatttcagtgcgtctctcatcattgaaacgctctttgatttcattaagttcttcacggatgatctcaagaactctttcttcattggctaaaatatctttcagctcagcgataagcgcaacaagtgattgatattcctcttcaatcttttcgcgctccagaccggttaatcgctgaaggcgcatatccagaatagcttgcgcttgtttttcagtcagtgagaattgttcgatcaaacccgttctcgcaatttcagccgtctgggaattgcggataagagaaataacggcatctaaatgatcgagagcaattcttaaaccttccagaatgtgagctcttgcttccgctttgcggagttcgtaagccgttctgcgccggatcacaaccttttggtgatcaagataatgctccagacattgtttcaggcttagtaccttcggctgtccgtcaacgagcgccagcagattgattccgaaagacgtctgcagggccgtttgtttgtacaggttattcaaaatgacgtgagcattggcgtcacggcggatctcaatgacgattctcattccgttacggtcggattcgtctcgcagatcggtaattccttcgatttttttgtctcggacaagatccgcgattttttcaattaatctcgctttgttcacctgataaggaagttccgtgacaataattctttcttttcccgatgaagtctcttcgatttcagccttagcccggatcgtgattgatccccgtccggattcatatgccttgcggatgccgctccggcccaaaatctgacctgcagtcggaaaatccgggcccgggatgtattccatcagctcctggtttgtaatctcaggattctcacttacggcaagcacgccttcaatgacttccccaagctgatgcgggggaatgtttgtcgccattccgaccgcaataccggcagccccgtttacgagcagattcggaaatctcgaaggcatgacggcaggctctctttctgaaccgtcatagttatcttgatagtcaatcgtgtctttcgtaatgtcacgcagaatttccattgcgatttttgacattctcgcttctgtgtaacgcatcgcggccgctgagtcgccgtcaaccgaaccgaagttgccgtgtccgtcaacaagcatgtagcggtagttaaaatcctgcgccattctgaccattgattcgtaaaccgctgagtcaccgtgcgggtggtacttaccgataacttcaccgacgatacgggcagattttttatatggtttgtcactggtcatgcctaaatcattcattgcgtacaaaatccgtctgtgaaccggcttcagaccgtcacgcacatccggaagcgcccgggatacgataacgctcattgcatagtccaggaaggatgtccgcatttcctgactgatattgacttcacgtacttgtggtgtgttttgttcactcattaaaaaaacctccctgaagtatcacatgaaataatgtgggagtagattgtccattatgatcttcaatacgatttcactattctccattatatcaataaacttgtgtttatacacattaatttagtagaatatacgggttttgcgggttttcagaggctttagaagccgctttgagaaaaaagccttatttcttaacgaaaataaggctttcttggttaaatatcaagatttttcacgtatctggcgtttgcttctatgaagtttctccgcggttctactttgtcacccatcagcatttcaaaagtctcgtcagcgtccattgcatcttcaagattgacttgcagaagcgttctggtcgcagggtccattgtcgtttcccaaagctgagtcgcgttcatttctccaagacctttataacgctggaggccgggcttaggtgattgcggaagctcttttaacagctcatcaagctgcttatcgttataagcgtattccacccgttttccctgctgcactttataaagcggcggctgggcaatgtagacatagccgttttcgatgatttcccgcatgtatctgtagaagaacgttaataaaagcgttctgatatgggcgccgtcaacatcggcatccgtcatgatgaccactttatgataacgcgctttttcaagattaaaatcttctccgattcctgttccgagggccgtgatcattgatctgacctcattgtttgagagaatcttatcaagtctggctttctcaacgttcagaatcttaccgcgcagcggcagaatggcttggaaatgacggtcccgtccctgtttcgctgatccgcccgcagagtcaccctctacgatatacagctcggaaatgctcggatctttagaagaacagtccgccagtttgcccggcagattggaaatctcaagcgcacttttgcgccgggtcaattcccgggcttttttcgccgccatccgcgctcttgcggccattaaacctttttcaacgattttgcgggctgagtccggattttcaagaaggaatgtttccagcgcagaagaaaacagcgtatcagtgatcgttctcgcttcggagttgccgagcttggttttcgtctgcccttcgaattgcggatcagggtgcttaattgaaataatggcagtcagcccttctctcacatcatccccgcttaaattcggatcattttctttgaaaatcccttttcttcttgcatagtcgtttatgacacgggtcagaccggttttaaatccggcctcgtgcgtgccgccttcgtatgtgttgatattatttgtgaaagaataaatattgcttgtatagctgtcgttgtattgcaatgcaacttcaaccgttatgccgtctttctcgccttcgatataaatcggctcttcatgaacgacttctttggaacggtttaagtactcaacatagcttttgattccgccttcgtagtggtactcgtttttccgttcttgtccttcacgtttgtcttcaatcgtgatgtttacgccttttgtcaggaaggccaattcccggacacggtttgaaagcagatcatagtcatatacagttgtttctttgaaaatttccgggtccggaacgaagtgcgtaatcgttccggtcttatcagtttcgccgatcacttcaagatcggccacaggtacaccgcgctcgtacgcctgataatggatttttccgtcacgatgaaccgtaacgtcaagagtggtcgacaaggcgtttacgacggatgcccctacaccgtgaagaccgccggatactttatatccgcttccgtcaaatttaccgccggcgtggagaacggtcatgatgacttcaaccgcagggcggcccatcttctcctggataccgaccggaattccgcgcccgttgtccttaacggtaatgctgttatctttttcaatctcgatgttaatatctgtacaataaccggccagggcttcgtcaatactgttgtcgacgatttcccacaccaaatggtgaaggcctttgctgttagttgatccgatgtacatccccggtctctttcgaacagcttccaaaccttctaatacctgtatctgattctcatcataactattttgctgctgttccatagccatgcacattcacctacacttttcttaaacgataatatattcattgtaaagatccgctaagaatctatttctaacataaattgcgcacgtttcttcagtgtgccggaagataagggagagtaatatatattctcagtcgtgactacgatagactttggcgtgccgtttacggacggcactactttttctttctgtctgtccagaaattcttcaacgatcggcgatacattgaccttgcagtcaaaaatgccgacgatatcgcgggttgaaacgacaaagtcgtcacctaaatgaatatacaatcgctcacctcatttcttcacttcactaacgcaccgttttccacacggaacattcctgcttgatgtaaggtatcgtggtcaatgccatccacgctcgtcgtggtgacaaatgtctgcacacggccttggatcgtatgaagcaaatgggactgtcggtaatcatccagctcgcttagtacatcatccaaaagtaaaatggggtattctccgatttcttcatgaatcaaatctatttcagccagctttagagacaaagccgtcgtacgctgctgtccctgcgaaccgtaagtctgcacatcgcgtccgttcacataaaaaaggacatcatcccgatgcggtccgaataatgtgacgcctcgttctatttctttttcttttaatttcgaaaaagactcctggtagctgttacctattttcgacaaatctttgggatctgatacatcaagcgccgtgtgatacttaagcgtcagttcttcaagtccccgggaaatgccggaatggatcggctgcgcccatttttcaagctgcgccgtaaactgcagacgtctggcgacaacttttgcggctgcttcaatcagctgatcagtgagaacgtcaagcatggtccggtcagtctgtttccggctttgcagctgtttcagaaaatgattccgctgtgaaaggattttttgataaagagataaatcatacagataaacggcagaaacctgcccgatctccatatcgagaaatcttctcctcacctgagggcttcctttgacgagatttaaatcctcaggggcaaacataatggtgttcagcgctccgacatactgactgagtttttgctgctctatatgattgaccttgccctttttaccttttttggagatgacaagctgcatcgggatgtccccgttgcgcttcatcactcttccttctattttagcatagtcttcgtcccaccgtataagttctttgtcatttgaggtgcggtgtgattttgccatcgaaaggacatagatggcttccatcagattggttttgccctgggcattttccccgatgatcacattcaccttgttttcgaattgaagctcagcgcgctcataattacggtaggatgttaattctaaattttggatatacaaccgctgtcacccgctttaattgacgacttgaaatgaaccaaatccttcaatcgcgaccacgtctccaacgtaaagctttctgccgcggcgattgtcaggttcattgttgacagtcacctcatgctcgctcagaaaccacttcgccatgccgccggactgaatcacatcagctaattttaaaaactggccaagcgtaatcatttctgtatcaatcgaaatcggatttgccataatatcgacctctttcaaatatcactaatatctaattgtactaaaaaatcctgaaataaggaaagggaaaacttgagggagcggctgatgaatagaaaagctgccgaactaagccggcagcacattctgtttgattaatacgttctgaccggaaggatgagctgaacgatggtctcatcattcggcgtacggataagaaacggtctcatcgctcccgtaaagctgatacggatgtccgctccttcaagtactttcagtgcgtccatcatatattttggactgaatgaaatatttaattcctcgccgtcaatcttgtctgccagcacagcttcgaccactttcccgatttccggagaatttgatgaaatctcaagcgaatccgccggtttggcagaaagttttacaacgttgttgcggccttctctcgccaataaagaagcacggtctatcgcctgtaaaaattccttcgtgttcacgacgatttccgttttgctttcctgcggaattaagctggtcgtgtccggatagtttccgtcaagcaatcttgagaagaacaatacgtttttcgctttgaacagaacttgggtttctgtaatgacgatatccaccagctcttggctgtcatcaagaattttgcttagctcggttaagcttttcccgggaatgaccacgttataagtactgtcttccggaatatcaagcttcgcctttcttaaagcgagtcggtggctatccgtggcagtgcataataattcaccgttttcaactttccagtttacacctgtcaagatggggcgtgtttctgaggcggacacagcgaacacggtttggcggatcaggtttttcaaaagatccgtcggaatctgaatggcgtgatgctcttcgatttgcggtagatgcggatattcatctgcatcaaggccgtttaaattaaattcggcttttccggaacggataatcgttaaatattgattttgaacttcgatttcaacagtcgccatcggcagttttttaacgatttcgctgaagaaacgcgcttgcagcacgatacttcccggctgatcgatcgtcacgatttctttatcatcatcttctttcggaatgaatgactcaattgaaatatcagagtcacttcctgtgaaagatactccttcatctgaggcgacgatcttaataccggtgagaatgggaattgtggttctggatgaaacggcttttagaacgtcttgtacactttcgactaaccgatctttttgaatcgtaaatttcatgtttatcctcctaacggataatataattaatatatttttaaaaatagcagtagtaatagtagggcctgtggatttgtggataagttgtgaaaaagacaggaaacacagcctatccacatgtggacagactgtgtatggctatgaaaaagttattcacactttccccgattcatccgaggacactattatttaagcagttcttttatttctttcacctgctgctgaagctgctcgtcatcaatcagcagttttgaaatcttttcgtgggcgtgaatgacggttgtatggtctctcccgccaaattcttccccgattttaggcaaagaagaatccgtcatttctcttgaaa

SEQ ID NO: 28 - protein, 136 aa, Bacillus amyloliquefaciens
MNTAYRVWDGEQMHYWDDEGLSLTIKNNGDWTLKRLYTDVLVPVVDSTNRNAALMWGTGLKDKNEKMIYEKDVIKFKSVYCENKIIKAVVKFRDSLGSFVFNRGDDQDFWRMDVSLSEIEVIGDIYQNPELLEGAE

SEQ ID NO: 29 - protein, 63 aa, Bacillus amyloliquefaciens
MKIAKVNNNNVVSVLKEGNQELVIMGRGIAFQKKTGDPADEARIEKVLTLDNKDVSEVQNPFV

SEQ ID NO: 30 - protein, 134 aa, Bacillus amyloliquefaciens
MKNGYAKTLSLGIQHVLAMYAGAVVVPLIVGAALGLNAEQLTYLVSIDIFMCGAATLLQVWRNKCFGIGLPVVLGCTFTAVAPIISIGKEYGISAIYGSILASGLLVILLSFFFGKLVSFFPPVVTGSVVRIID

SEQ ID NO: 31 - protein, 842 aa, Bacillus amyloliquefaciens
MKRKKDGLSKQVHIYSVDTSAFYNDKENSLHNKILKSYRYRDYLKTLDNVNNKHKKYISQRITYLKECLYSAFEEHNDIRTLRTDSLRDNKVISLFDSVLTRTLGIKENTLSEEIMVVQTYHFEVLKDIIDQGFLHNNEKYVYFTSSAGQIRTKKSCFIKKSTYDKYQDALTCGLSIEKINSLGGSSINKWNSYMALSNSASSPWEIDIDKAIVVDDLETDVSSLVDYIDRDTYEITRKTMNIPIEHTDGCGMILPTLSSKSFMVRLPWVKGLLVPFDFRKFAEENKAFKVTDIYGKEWDVVKDDVQIIFTKSQFKMWKYYSSWEEYQGNYKKYGCLGAKLNEEDPSVEGKLTYQMLQTLTDISGEELIQMSSKTVKEITTLGTDKETMLRVLGATEKKKHRTALQDALLLYPELLNDDHTKEIIKNKKKSMIKDAKSGKLLVDGARYTYLCPDLYAFCEKLFLNIQNPKGLLSGNDVHCSLYDEGYIDILRSPHLFREHGVRWNKKDEKYEKWFITPGVYTSIHDPISKLLQFDNDGDKALIISDELIVNIAKRNMENIVPLYYEMSVAQKQKINSRNIYEALTLAYGINIGEYSNNITKIWNSDNINLDVIKWLCMENNFTIDFAKTLFMPTRPDHVDEKIKDYIKNKVPHFFINAKDKEEHSVELINESTVNKLDSIIPSDRINFAAVAGKFDYRFLLKNRDIKLDDAIIREYKRLDQNKKWLMNDEDIKPGQKLYVYKVIKDRLLKIYNDEQSVADVLVKHLYKKKSKFKSTLWECFGDLILENMQNNLKRFKSCYSCGKMFKSISNKSKYCNKCALEIEKKNHRLRQKKYSKKKMTK

SEQ ID NO: 32 - protein, 370 aa, Bacillus amyloliquefaciens
MFGFIGVGQAGGSIADEAMKRGFHSVAINYSLSDLNSLINIQDKLHLVGTEGVGKDRSVAAKHMKNNWESSIEFIKNTMEKPSVQVIFVVFSAAGGTGSGVAPILLELLNECLTHKTIVAVPILPDNNEVLVNQMNTLELLDDLSMPETCVLPLDNQMVLSKYEGKISESRLYKETNKMFLDLIEVLLNYTDRGSKISTLDRKDLNQLFDTPGIMTIAQTDLNEFTIEGKYFDKLHEDIQKSWNNSIFTPVEFTNVMRAGVILDVHEFLTEHISYNELFNVFDNKMPLDLFKGHYDKGNRAITILSGLTWINERMKQLDDLIESGNTEVKETTVYKAKNRRREDLFKPRKLENKESKKTSYMEALKRLKR

SEQ ID NO: 33 - protein, 382 aa, Bacillus amyloliquefaciens
MNLKQMIKNECEKDNQLAAKLSKIAGYKKVNGFYKFINTPEKEMDNLGGLINIVKSLFPDNEEQLLSDYFLSLDPNKKCARQSVEYSDINQWDTLTDKIVSRLSSSKNLASQEWGNIYSIHRRLSESKISLTDAIRATGKCKTDEMLFFSNAMLMYEYLKVGEFGLMKSTLSLLNFNDLPEGFVKDCYMNRISLLNANIYLNDNEIEKSRYYSEQVIQNSNINRLKVFGHLTYGNTLIFESYSKAKEQYLKGLEFARDNEHHKYKLRLALCFLSNLWNKDNKWLDFDTDNIPDKIEVAYYYTNNKEFNKAEKVINELENMELYEYDSGILDYIKGILYQNKNYFYESTAKLKKSGDKLFINLPLAELRKMGCDEKLLELIMV

SEQ ID NO: 34 - protein, 338 aa, Bacillus amyloliquefaciens
MDVYDLKNHIIEKPEYIVLILEQTGFYNVDERGNEYRCARKKGRNPTSVKVNKTTLGATCFSTNLKGDLITLVQNKLGLSFPKTIKRISEIVDYKSEEEYKPPELPFGGFYKNIRRLSNPMDLDLETYSDDILDQFVSVPNKLFYEDGILPLTQSLFQVGYDSVSGRITVPWKSLSGELCGVMGRLNKKEVNDEETKWLPIISFPKSKTLYGFVENYSSIREKSIVMIGESEKHSMALASKGLNVGVSLGGSFLSEIQANHIKSMFPKKSLVMMDEGLGEEHSVEIANSLKFENFFENEVGYIFDRENKYLPKGSKMAPADLDKSTLHRLIRDCTVWI

SEQ ID NO: 35 - protein, 67 aa, Bacillus amyloliquefaciens
MPKFWSYPEGLKVIINENAKNACPHHVGREGKIIELLHSATYDYAVSDETGDITFFKEHELNPAKGG

SEQ ID NO: 36 - protein, 172 aa, Bacillus amyloliquefaciens
MKKVIAIDMDQVLADLLSDWVAYINTYDDPFLKEEDILCWDISKYSNTQNNVYRHLDYELFRNLDVIEGSQRAVKELAKKYEVYVVTTATNHPESLKAKLEWLTEHFPYIPHSNVVLCGNKNIIKADIMIDDGVHNLETFDGMKILFDAPHNRNDNRFIRVMNWEEIERKLL

SEQ ID NO: 37 - protein, 396 aa, Bacillus amyloliquefaciens
MTEKYDKWTRLLDMIEPNYAFESAVVGNSIYVLGGARNQKYNKNYSFDTISQKWTQGLDIPTPRVGSCTAVIGNYIYVLGGYKGANVYSSVDVYDTKTNTWGRVPDIPTPTCHASAAVINDTIYLIGGFDTDAAHSQHYAFDTLSKTWSVKKAPPINIYATETEVFNGKIYLVGGQTKEVVQGHIRSDLNEYIYEYDPVMDRWNRKKFLGPLQNTSTAVLNNKIYIIGGRKNPSVIEPLTKVYDPIKDEISVEKPYPFERYDARIAAVGDNLYLFGGLTPSGYALEYLHALTPVKTEEDKDGEPKNPEEPPNKQPASNRAILLVTMTTGLEKEFDLSMEEIKDFIRWYDQKSSGIGLSRYVIEKHYNNIGPFQNRRDHIVFGNILTFNVSEYTLDK

SEQ ID NO: 38 - protein, 396 aa, Bacillus amyloliquefaciens; identical to SEQ ID NO: 37

SEQ ID NO: 39 - protein, 59 aa, Bacillus amyloliquefaciens
MAGYKKAAPRIARLLDYVPESDLADVPDPYYTGNFSEVYALVESGCRHLLETIKKDHHL

SEQ ID NO: 40 - protein, 84 aa, Bacillus amyloliquefaciens
MGKEVVPQAERVLNAIAELHGGIAFDFTSFPRSCEYYLEHGTMMPDDGLETLQHFDALFLGAVGNQKLVPDHVSLWGLPIKIRR

SEQ ID NO: 41 - protein, 347 aa, Bacillus amyloliquefaciens
MTNSVQQDKQVPKKYPQAAVMQMVSGLGFSLAVKTAVELDVFSAFQNGPASAEAIAEALELNPSALFRLLRALESVGLVAQAQNGYYDVTEYGATLMPGKAKSIEPLVEYLLHETVVQSMFKMDYSIKTGKSAFEAIYGDKWYENNSLDQDYLKTMDKAMEIYSKMSLPSILKAYSFEKFDVIVDVAGGMGQLITGILGVAPKSKGILFDLPKTIQSAKKHLASSEMSERCQFTEGSMFEEIPSGGDLYVISKVLNDWDDEHVVAILENIAGAMSDHSKLIIVENVPEADRLSPEEAFRDLLFLVCSAGGRVRKITEFEQLIEKAGLTLLNVIQTPSKYTILECGKK
